(19) United States
(12) Patent Application Publication
(10) Pub. No.: US 2014/0050725 A1
(43) Pub. Date: Feb. 20, 2014

(54) LOW DENSITY LIPOPROTEIN - RELATED PROTEIN 6 (LRP6) - HALF LIFE EXTENDER CONSTRUCTS

(71) Applicant: Novartis AG, Basel (CH)

(72) Inventors: David JENKINS, Carlisle, MA (US); Ming LEI, Acton, MA (US); Andreas LOEW, Somerville, MA (US); Li ZHOU, West Roxbury, MA (US)

(73) Assignee: NOVARTIS AG, Basel (CH)

(21) Appl. No.: 13/667,284

(22) Filed: Nov. 2, 2012

Related U.S. Application Data
(60) Provisional application No. 61/555,848, filed on Nov. 4, 2011.

(51) Int. Cl. C07K 16/46; C07K 14/775

(52) U.S. Cl. CPC C07K 16/46; C07K 14/775
USPC 424/134.1; 530/387.3; 536/23.4; 435/320.1

(57) ABSTRACT

The present invention relates to LRP6 constructs that bind to LRP6 receptor. The LRP6 constructs comprise at least one LRP6 binding moiety and a half-life extender molecule such that the LRP6 construct inhibit the Wnt signaling pathway without potentiation of the Wnt signal. The LRP6 constructs also have an increased half-life to provide more time for the therapeutic benefit.

### RELATED APPLICATIONS

[0001] This application claims priority to U.S. Provisional Application No. 61/555,848 filed on Nov. 4, 2011, the contents of which are incorporated herein by reference in their entirety.

### FIELD

[0002] The present invention relates to LRP6 constructs that bind to LRP6 receptor. The LRP6 constructs comprise at least one LRP6 binding moiety and a half-life extender molecule such that the LRP6 construct inhibit the Wnt signaling pathway without potentiation of the Wnt signal. The LRP6 constructs also have an increased half-life to provide more time for the therapeutic benefit.

### BACKGROUND TO THE INVENTION

[0003] The Wnt/β-catenin pathway regulates diverse biological processes during development and tissue homeostasis through modulating the protein stability of β-catenin. The pathway has also been implicated in many human cancers (see Clevers et al., (2006) Cell 127:469-480; and Logan et al., (2004) Annu. Rev Cell Dev. Biol 20:781-810).

[0004] The Wnt signal is transduced across the plasma membrane through two distinct receptor types, the serpentine receptor Frizzled, and the single-transmembrane proteins LRP5 or LRP6. The Wnt proteins promote the assembly of the Frizzled-LRP5/6 signaling complex, and induce phosphorylation of the cytoplasmic PPPSPxS motifs of LRP5/6 by GSK3 and Casein Kinase I. Phosphorylated LRP5/6 bind to Axin and inactivate the β-catenin degradation complex. Stabilized β-catenin enters the nucleus, binds to the TCF family transcription factors, and turns on transcription.

[0005] The large extracellular domain of LRP5/6 contains four YWTD-type β-propeller regions that are each followed by an EGF-like domain, and the LDLR domain. Each propeller region contains six YWTD motifs that form a six-bladed β-propeller structure. Biochemical studies suggest that Wnt proteins physically interact with both Frizzled and LRP6 and induce formation of Frizzled-LRP6 signaling complex (Semenov et al., (2001) Curr. Biol 11, 951-961; Tamai, et al. (2000) Nature 407, 530-535). Besides Wnt proteins, the large extracellular domain of LRP5/6 binds to multiple secreted Wnt modulators, including Wnt antagonist, DKK1 and Sclerostin (SOST), and Wnt agonist R-Spondins.

[0006] Although antibodies to LRP6 have been identified, the therapeutic properties of IgG formatted molecules can be limited by several factors, including limited tissue penetration due to large size and poor vascularization of target tissues, such as tumors (Schmidt & Wittrup, (2009) Mol. Cancer Ther. 8, 2861-71). In addition, for oncology uses, an immunosuppressive tumor microenvironment can suppress Fc mediated effector function (Dougan & Dranoff, 2009, Curr Protocol Immunol Chapter 20: Unit 20.11). Hence, there is a need for new protein therapeutic formats. However, the therapeutic efficacy of recombinant proteins smaller than 50-60 kDa can be limited by short serum half-life due to, for example, renal clearance and endocytosis by endothelial cells.

[0007] Accordingly, there is a need for new LRP6 antibody formats and methods to prolong serum half life of these antibody formats to enable the generation of effective therapeutics. In particular, there is a need for new LRP6 antibody formats that inhibit the Wnt signaling pathway, especially to treat human cancer.

### SUMMARY

[0008] This invention provides novel LRP6 constructs that inhibit Wnt signaling without potentiation of the Wnt signal and demonstrate and increased half life. Specifically, the invention provides LRP6 conjugates comprising at least one LRP6 binding moiety and at least one half-life extender such that the LRP6 construct binds to LRP6 and inhibits Wnt signaling without significant potentiation of the Wnt signal and has an increased half life (e.g., at least about 5 hours, at least 10 hours, at least 15 hours, at least 20 hours, at least 25 hours, at least 30 hours, at least 35 hours, at least 40 hours, or more).

[0009] Accordingly, in one aspect, the invention pertains to an isolated low density lipoprotein-related protein 6 (LRP6) construct comprising first and second LRP6 binding moieties that bind to LRP6, and a half-life extender molecule, wherein the half life extender molecule is selected from the group consisting of PEG, Fc and HSA, wherein the first and second LRP6 binding moieties are linked to the N- and C-termini of the half-life extender, wherein the LRP6 construct inhibits a canonical Wnt signal transduction pathway; and wherein the LRP6 construct displays no significant potentiation of a Wnt signal in the presence of unblocked LRP6 binding protein. In one embodiment, the LRP6 binding moieties are selected from the group consisting of antibodies, bispecific single chain Fv ((scFv′)₂) molecules, single domain antibodies, diabodies, triabodies, hormones, Fab fragments, F(ab′)₂ molecules, scFab fragments, and tandem scFv (taFv) fragments. In one embodiment, the LRP6 binding moieties are single chain Fv molecules (scFvs). In one embodiment, the LRP6 construct binds to more than one Propeller region of LRP6, wherein the Propeller region is selected from the group consisting of Propeller 1 and Propeller 3. In one embodiment, the first LRP6 binding moiety is linked to the N-terminal of the half-life extender and binds to the Propeller 1 region of LRP6, and the second LRP6 binding moiety is linked to the C-terminal of the half-life extender and binds to the Propeller 3 region of LRP6. In another embodiment, the first LRP6 binding moiety is linked to the C-terminal of the half-life extender and binds to the Propeller 1 region of LRP6, and the second LRP6 binding moiety is linked to the N-terminal of the half-life extender and binds to the Propeller 3 region of LRP6. In one embodiment, the LRP6 binding protein is a Wnt binding protein selected from the group consisting of Wnt 1, Wnt 3, and Wnt 3a. In one embodiment, the LRP6 binding moieties are linked to the N- and C-termini of the half-life extender via a linker selected from the group consisting of an Fc linker, a hinge linker, a Gly-Ser linker, an Ala linker, and a KTHT linker. In another embodiment, the LRP6 binding moieties are linked to the N- and C-termini of the half-life extender by direct fusion to the half-life extender. In one embodiment, the LRP6 construct inhibits phosphorylation of LRP6 as assessed by a Wnt ligand induced phosphorylation assay. In one embodiment, the LRP6 construct has the functional activity of depleting a cell population, inhibiting or reducing proliferation of a cell population, inhibiting or reducing secretion of inflammatory mediators from a cell population, inhibiting or reducing secretion of cytoplasmic granules from a cell population, wherein the cell population is selected from the group consisting of tumor cells, and Wnt dependent cells. In one embodiment, the LRP6 construct shows increased half-life of about 5 hours compared with the LRP6 binding moiety without a half-life extender.

[0010] In another aspect, the invention pertains to an isolated low density lipoprotein-related protein 6 (LRP6) construct comprising first and second LRP6 single chain Fv molecules (scFvs) that bind to LRP6, and a human serum albumin, wherein the first and second scFv molecules are linked to the N- and C-termini of the human serum albumin, wherein the LRP6 construct inhibits a canonical Wnt signal transduction pathway, and wherein the LRP6 construct displays no significant potentiation of a Wnt signal in the presence of an LRP6 binding protein. In one embodiment, the first LRP6 scFv is linked to the N-terminal of the human serum albumin and binds to the Propeller 1 region of LRP6, and the second LRP6 scFv is linked to the C-terminal of the human serum albumin and binds to the Propeller 3 region of LRP6. In another embodiment, the first LRP6 scFv is linked to the C-terminal of the human serum albumin and binds to the Propeller 1 region of LRP6, and the second LRP6 scFv is linked to the N-terminal of the human serum albumin and binds to the Propeller 3 region of LRP6. In one embodiment, the LRP6 binding protein is a Wnt binding protein selected from the group consisting of Wnt 1, Wnt 3, and Wnt 3a. In one embodiment, the first and second LRP6 scFvs are indirectly linked to the N- and C-termini of the human serum albumin via an attachment linker selected from the group consisting of an Fc linker, a hinge linker, a Gly-Ser linker, an Ala linker, and a KTHT linker. In another embodiment, the first and second LRP6 scFvs are directly linked to the N- and C-termini of the human serum albumin by direct fusion to the human serum albumin. In one embodiment, the human serum albumin is selected from the group consisting of a mutant human serum albumin, or a fragment of a human serum albumin. In one embodiment, the mutant human serum albumin comprises mutations C34S and N503Q. In one embodiment, the fragment of human serum albumin comprises at least one domain of human serum albumin selected from the group consisting of DI, DII, DIII, and DIV. In one embodiment, the scFv fragment comprises at least one amino acid mutation that improves stability of the scFv compared with the unmutated scFv fragment, wherein the amino acid mutation is selected from FIGS. 32-35. In one embodiment, the scFv fragment binds to the Propeller 1 region of LRP6 and comprises at least one amino acid mutation that improves stability of the scFv compared with the unmutated scFv fragment, wherein the amino acid mutation is in a selected from the group consisting of I34M, and S49A. In another embodiment, the scFv fragment binds to the Propeller 3 region of LRP6 and comprises at least one amino acid mutation that improves stability of the scFv compared with the unmutated scFv fragment, wherein the amino acid mutation is M100F. In yet another embodiment, the scFv fragment binds to the Propeller 1 region of LRP6 and comprises at least one amino acid mutation that improves stability of the scFv compared with the unmutated scFv fragment, wherein the amino acid mutation is in a selected from the group consisting of I34M, and S49A; and an scFv fragment that binds to the Propeller 3 region of LRP6 and comprises at least one amino acid mutation that improves stability of the scFv compared with the unmutated scFv fragment, wherein the amino acid mutation is M100F. In one embodiment, the LRP6 construct inhibits phosphorylation of LRP6 as assessed by a Wnt ligand induced phosphorylation assay. In another embodiment, the LRP6 construct has the functional activity of depleting a cell population, inhibiting or reducing proliferation of a cell population, inhibiting or reducing secretion of inflammatory mediators from a cell population, inhibiting or reducing secretion of cytoplasmic granules from a cell population, wherein the cell population is selected from the group consisting of tumor cells, and Wnt dependent cells. In one embodiment, the LRP6 construct shows increased half-life of about 5 hours compared with the LRP6 binding moiety without a half-life extender.

[0011] In another aspect, the invention pertains to an isolated low density lipoprotein-related protein 6 (LRP6) construct comprising SEQ ID NO 293; or an amino acid sequence comprising at least 95% sequence identity with SEQ ID NO: 293.

[0012] In another aspect, the invention pertains to an isolated low density lipoprotein-related protein 6 (LRP6) construct comprising SEQ ID NO: 295; or an amino acid sequence comprising at least 95% sequence identity with SEQ ID NO: 295.

[0013] In another aspect, the invention pertains to a nucleic acid comprising a nucleotide sequence encoding a low density lipoprotein-related protein 6 (LRP6).

[0014] In another aspect, the invention pertains to a nucleic acid comprising a nucleotide sequence encoding a low density lipoprotein-related protein 6 (LRP6) construct comprising a SEQ ID NO: 293; or a nucleotide sequence comprising at least 98% sequence identity with SEQ ID NO: 293.

[0015] In another aspect, the invention pertains to a nucleic acid comprising a nucleotide sequence encoding a low density lipoprotein-related protein 6 (LRP6) construct comprising a SEQ ID NO: 295; or a nucleotide sequence comprising at least 98% sequence identity with SEQ ID NO: 295.

[0016] In another aspect, the invention pertains to a vector comprising the nucleic acid encoding the LRP6 construct.

[0017] In another aspect, the invention pertains to a pharmaceutical composition comprising a low density lipoprotein-related protein 6 (LRP6) construct and a pharmaceutically acceptable carrier.

[0018] In another aspect, the invention pertains to a method of making a low density lipoprotein-related protein 6 (LRP6) construct of claim 1 comprising: (a) providing a first single chain Fv molecule that binds to a first binding site of an LRP6 target receptor; (b) providing a second single chain Fv molecule that binds to a second binding site of an LRP6 target receptor; and (c) directly or indirectly linking the first scFv and the second scFv to a half-life extender molecule, wherein the LRP6 construct inhibits a canonical Wnt signal transduction pathway, and wherein the LRP6 construct displays no significant potentiation of a Wnt signal in the presence of an LRP6 binding protein.

[0019] In another aspect, the invention pertains to a method of treating a disease mediated by a canonical Wnt signaling pathway using a low density lipoprotein-related protein 6 (LRP6) construct.

[0020] In another aspect, the invention pertains to a method of treating a cancer comprising selecting a subject having an LRP6 expressing cancer by administering to a subject in need thereof an effective amount of a composition comprising a low density lipoprotein-related protein 6 (LRP6) construct. In one embodiment, the subject is a human.

[0021] In another aspect, the invention pertains to a method of treating a cancer comprising selecting a subject having an LRP6 expressing cancer, administering to a subject in need thereof an effective amount of a composition comprising a low density lipoprotein-related protein 6 (LRP6) construct of any one of the previous claims, wherein the cancer is selected from the group consisting of breast cancer, lung cancer, multiple myeloma, ovarian cancer, liver cancer, liver cancer gastric cancer, prostate cancer, acute myeloid leukemia, chronic myeloid leukemia, osteosarcoma, squamous cell carcinoma, and melanoma.

[0022] In another aspect, the invention pertains to use of a low density lipoprotein-related protein 6 (LRP6) construct of any one of the previous claims in the manufacture of a medicament for the treatment of a cancer selected from the group consisting of breast cancer, lung cancer, multiple myeloma, ovarian cancer, liver cancer, liver cancer gastric cancer, prostate cancer, acute myeloid leukemia, chronic myeloid leukemia, osteosarcoma, squamous cell carcinoma, and melanoma.

[0023] In another aspect, the invention pertains to a low density lipoprotein-related protein 6 (LRP6) construct LRP6 for use as a medicament. In another aspect, the invention pertains to a low density lipoprotein-related protein 6 (LRP6) construct having SEQ ID NO: 293 for use in treating a cancer mediated by a canonical Wnt signaling pathway. In another aspect, the invention pertains to a low density lipoprotein-related protein 6 (LRP6) construct having SEQ ID NO: 295 for use in treating a cancer mediated by a canonical Wnt signaling pathway. In another aspect, the invention pertains to a low density lipoprotein-related protein 6 (LRP6) construct having SEQ ID NO: 293 for use as a drug. In another aspect, the invention pertains to a low density lipoprotein-related protein 6 (LRP6) construct having SEQ ID NO: 295 for use as a drug.

### BRIEF DESCRIPTION OF FIGURES

[0024] FIGS. 1A-E are graphs showing the activity of anti-LRP6 mouse serum albumin fusion molecules in HEK293 STF cells (gene reporter assay) transiently expressing Wnt1 or Wnt3a ligands. The data show that anti-LRP6 MSA fusion molecules block either Wnt1 or Wnt3a signaling;

[0025] FIG. 2 shows the potency of anti-LRP6 bispecific serum albumin fusions and bispecific LRP6 antibody half molecules to inhibit Wnt1 and Wnt3a stimulated signaling in STF reporter gene assays;

[0026] FIG. 3 is a graph showing a single IV dose of an LRP6 mouse serum albumin fusion molecule that binds to β-propeller 1 region at 5 mg/kg in a non-tumor bearing nude mouse;

[0027] FIG. 4 is a graph showing the serum concentration and effect on Axin2 mRNA of an LRP6 mouse serum albumin fusion molecule that binds to β-propeller 1 region at 5 mg/kg in MMTV-Wnt1 tumor bearing mice;

[0028] FIG. 5 is a graph showing the serum concentration and effect on Axin2 mRNA of an LRP6 mouse serum albumin fusion molecule that binds to β-propeller 1 region at 5 mg/kg in MMTV-Wnt1 tumor bearing mice;

[0029] FIG. 6 is a graph showing that a Propeller 1 anti-LRP6 Fab MSA fusion protein causes in vivo tumor regression in a MMTV-Wnt1 model;

[0030] FIG. 7 is a graph showing the activity of anti-LRP6 Fab, mouse serum albumin conjugated and PEGylated anti-LRP molecules in HEK293 STF cells (gene reporter assay) transiently expressing Wnt1 or Wnt3a ligands;

[0031] FIG. 8 is a schematic of anti-LRP6 scFvs and HSA fusion molecules;

[0032] FIG. 9 shows several anti-LRP6 fusion molecules;

[0033] FIGS. 10A-C are photographs of SDS-PAGE gels showing purified bispecific HSA fusion molecules;

[0034] FIG. 11 shows the thermostability measurements of HSA fusion based biparatopic molecules;

[0035] FIGS. 12A and B are graphs from DSF experiments showing the Tm of each molecule. The Tm is indicated by the midpoint of the peak or peaks. The curves from non mutated molecules are highlighted;

[0036] FIGS. 13A and B are graphs from DSC experiments showing the Tm of each molecule;

[0037] FIG. 14 shows the thermostability of HSA fusion based biparatopic molecules as determined by DSF;

[0038] FIGS. 15A-B are graphs showing the elution profiles of 801T and 802T from analytical SEC;

[0039] FIG. 16 shows aggregation of anti-LRP6 HSA fusion based biparatopic molecules by analytical SEC after multiple freeze-and-thaws (FTs);

[0040] FIGS. 17A-E are graphs showing the binding of anti-LRP6 scFv fusion molecules to LRP6 as determined by ELISA;

[0041] FIG. 18A-B are graphs showing the ability of anti-LRP6 scFv fusion molecules to compete with soluble LRP6 proteins for binding to plate associated LRP proteins by competition ELISA;

[0042] FIG. 19; (A, C-E) are graphs that show the activity of anti-LRP6 fusion molecules in Wnt1 and Wnt3a-stimulated HEK293 Wnt reporter gene assays; (B) is a table summarizing the potency of the anti-LRP6 fusion molecules;

[0043] FIG. 20 is a graph that shows the activity of anti-LRP6 fusion molecules in Wnt1 and Wnt3a-stimulated MDA-MB435 Wnt reporter gene assays;

[0044] FIG. 21 (A) is a graph showing a single IV dose of anti-LRP6 human serum albumin fusion molecules that bind to β-propeller 1 region at 5 mg/kg in MMTV-Wnt1-tumor bearing mice. (B) is a graph showing the effect on Axin2 mRNA of anti-LRP6 human serum albumin fusion molecules that bind to β-propeller 1 region at 5 mg/kg in an MMTV-Wnt1 tumor bearing mouse;

[0045] FIG. 22 is a graph showing a single IV dose of anti-LRP6 human serum albumin fusion molecules that bind to β-propeller 1 region at 5 mg/kg in naive rats;

[0046] FIG. 23 (A) is a graph showing that a Propeller 1 anti-LRP6 Fab human serum albumin fusion protein causes anti-tumor effects in an in vivo tumor MMTV-Wnt1 model (B) is a bar chart showing the effect on MMTV-Wnt1 tumor Axin2 mRNA expression following the various treatments at the end of the study;

[0047] FIG. 24 (A) is a graph showing that a Propeller 1 anti-LRP6 Fab human serum albumin fusion protein causes regressions in an in vivo tumor MMTV-Wnt1 model; (B) is a bar chart showing the effect on MMTV-Wnt1 tumor Axin2 mRNA expression following the various treatments at the end of the study; (C) is a graph showing that 802TF causes dose-dependent anti-tumor activity in an in vivo tumor MMTV-Wnt1 model;

[0048] FIG. 25 shows several anti-LRP6 Fc fusion molecules;

[0049] FIG. 26 is a schematic of anti-LRP6 Fc-fusion molecules;

[0050] FIG. 27 is a photograph of an SDS-PAGE gel showing purified anti-LRP6 bispecific Fc fusion molecules;

[0051] FIG. 28 is a graph showing the elution profile of 911T from analytical SEC;

[0052] FIG. 29 is a graph showing the elution profile of 912T from analytical SEC;

[0053] FIG. 30 is a graph showing the binding of anti-LRP6 scFv fusion molecules to LRP6 as determined by ELISA;

[0054] FIG. 31 is a graph that shows the activity of anti-LRP6 fusion molecules in Wnt1 and Wnt3a-stimulated HEK293 Wnt reporter gene assays;

[0055] FIG. 32 is a table showing the effect of single mutations in MOR06475 scFv on Tm.

[0056] FIG. 33 is a table showing the effect of single mutations in MOR08168 scfv on Tm;

[0057] FIG. 34 is a table showing the effect of double mutations in MOR08168 scFv on Tm in material expressed in both bacterial and mammalian systems; and

[0058] FIG. 35 is a table summarizing the binding and functional activities of the wild type and single/double mutated versions of MOR06475 and MOR08168 scFvs in ELISA, Proteon affinity and STF reporter gene assays.

### DETAILED DESCRIPTION

### Definitions

[0059] In order that the present invention may be more readily understood, certain terms are first defined. Additional definitions are set forth throughout the detailed description.

[0060] The term “LRP6” refers to human low density lipoprotein-related protein 6 as defined in Accession No. NP002327.

[0061] The phrase “LRP6 construct” as used herein refers to a molecule comprising at least one LRP6 binding moiety and at least one half-life extender molecule. The LRP6 binding moiety can be any molecule that binds to at least one region of LRP6, such as the Propeller region of LRP6. The LRP6 construct binds to LRP6 and inhibits the Wnt signaling pathway without potentiation of the Wnt signal. In addition, the LRP6 construct demonstrates increased in vitro and in vivo half-life compared with the LRP6 binding moiety alone (e.g., by at least 5 hours, at least 10 hours, at least 15 hours, at least 20 hours, at least 25 hours, at least 30 hours, at least 35 hours, at least 40 hours, or more).

[0062] The term “LRP6 binding moiety” refers to any molecule that specifically binds to an LRP6 target epitope, antigen, ligand, or receptor. LRP6 binding moieties include but are not limited to antibodies (e.g., monoclonal, polyclonal, recombinant, humanized, and chimeric antibodies), antibody fragments (e.g., Fab fragments, Fab′₂, scFv antibodies, SMIP, domain antibodies, diabodies, minibodies, scFv-Fc, affibodies, nanobodies, and domain antibodies), receptors, ligands, aptamers, and other molecules having a known binding partner.

[0063] The term “antibody” as used herein refers to whole antibodies that interact with (e.g., by binding, steric hinderance, stabilizing/destabilizing, spatial distribution) an LRP6 epitope and inhibit signal transduction. A naturally occurring “antibody” is a glycoprotein comprising at least two heavy (H) chains and two light (L) chains inter-connected by disulfide bonds. Each heavy chain is comprised of a heavy chain variable region (abbreviated herein as VH) and a heavy chain constant region. The heavy chain constant region is comprised of three domains, CH1, CH2 and CH3. Each light chain is comprised of a light chain variable region (abbreviated herein as VL) and a light chain constant region. The light chain constant region is comprised of one domain, CL. The VH and VL regions can be further subdivided into regions of hypervariability, termed complementarity determining regions (CDR), interspersed with regions that are more conserved, termed framework regions (FR). Each VH and VL is composed of three CDRs and four FRs arranged from amino-terminus to carboxy-terminus in the following order: FR1, CDR1, FR2, CDR2, FR3, CDR3, FR4. The variable regions of the heavy and light chains contain a binding domain that interacts with an antigen. The constant regions of the antibodies may mediate the binding of the immunoglobulin to host tissues or factors, including various cells of the immune system (e.g., effector cells) and the first component (Clq) of the classical complement system.

[0064] For example, the antibody can be a human antibody, a humanized antibody, a bispecific antibody, a chimeric antibody, or a protein scaffold with antibody-like properties, such as fibronectin or ankyrin repeats. The antibody can have any of the following isotypes: IgG (e.g., IgG1, IgG2, IgG3, and IgG4), IgM, IgA (e.g., IgA1, IgA2, and IgAsec), IgD, or IgE.

[0065] Both the light and heavy chains are divided into regions of structural and functional homology. The terms “constant” and “variable” are used functionally. In this regard, it will be appreciated that the variable domains of both the light (VL) and heavy (VH) chain portions determine antigen recognition and specificity. Conversely, the constant domains of the light chain (CL) and the heavy chain (CH1, CH2 or CH3) confer important biological properties such as secretion, transplacental mobility, Fc receptor binding, complement binding, and the like. By convention the numbering of the constant region domains increases as they become more distal from the antigen binding site or amino-terminus of the antibody. The N-terminus is a variable region and at the C-terminus is a constant region; the CH3 and CL domains actually comprise the carboxy-terminus of the heavy and light chain, respectively.

[0066] The term “antibody fragment” as used herein, refers to one or more fragments of an antibody that retain the ability to specifically interact with (e.g., by binding, steric hinderance, stabilizing/destabilizing, spatial distribution) an LRP6 epitope and inhibit signal transduction. The epitope binding function of an antibody can be performed by fragments of a full-length antibody. Examples of binding fragments encompassed within the term “antigen-binding portion” of an antibody include but are not limited to: (i) a Fab fragment, a monovalent fragment consisting of the VL, VH, CL, and CH1 domains; (ii) a F(ab′)2 fragment, a bivalent fragment comprising two Fab fragments linked by a disulfide bridge at the hinge region; (iii) a Fd fragment consisting of the VH and CH1 domains; (iv) a scFab consisting of VL, VH, CL and CH1 domains, (v) a dAb including VH and VL domains; (vi) a dAb fragment (Ward et al, Nature 341:544-546 (1989)), which consists of a VH domain; (vii) a dAb which consists of a VH or a VL domain; (viii) an isolated complementarity determining region (CDR); and (ix) a combination of two or more isolated CDRs which may optionally be joined by a synthetic linker. These antibody fragments are obtained using conventional techniques known to those with skill in the art, and the fragments are screened for utility in the same manner as are intact antibodies. Antibody fragments can be produced by recombinant DNA techniques, or by enzymatic or chemical cleavage of intact immunoglobulins.

[0067] The term “scFv” as used herein, refers to VL and VH joined together using recombinant methods, or by a synthetic linker that enables them to be made as a single protein chain in which the VL and VH regions pair to form monovalent molecules (known as single chain Fv (scFv); see e.g., Bird et al, Science 242:423-426 (1988) and Huston et al, Proc. Natl. Acad. Sci USA 85:5879-5883 (1988)).

[0068] The term “half-life extender molecule” refers to a biological or chemical entity that imparts additional functionality to a molecule to which it is attached. In a particular embodiment, the half-life extender is a polypeptide, e.g., human serum albumin (HSA), or a chemical entity, e.g., polyethylene gycol (PEG) which increases the half-life of the LRP6 binding moieties. Half-life extender molecules can increase the half-life of an LRP6 binding moiety by at least about 5 hours, at least 10 hours, at least 15 hours, at least 20 hours, at least 25 hours, at least 30 hours, at least 35 hours, at least 40 hours, or more as determined by the assays disclosed herein (e.g., mRNA expression levels of Axin2).

[0069] The phrase “Wnt signaling pathway” as used herein refers to the canonical Wnt pathway in which members of the Wnt family of secreted protein ligands bind a receptor complex of LRP and Frizzled (FZD) allowing β-catenin to be translocated into the nucleus, interact with the LEF/TCF transcription factors and activate target gene expression. The Wnt signaling pathway can be measured using a Wnt reporter gene assay or other measure of Wnt directed signaling (e.g., LRP6 phosphorylation, β-catenin stabilization and nuclear translocation, cellular proliferation/survival) as described herein.

[0070] The phrase “Wnt 1 signaling pathway” refers to a canonical Wnt pathway that is activated by LRP6 interacting with the Wnt1 ligand and the class of Wnt1 binding ligands, such as Wnt2, Wnt6, Wnt7a, Wnt7b, Wnt9a, Wnt10a, or Wnt10b.

[0071] The phrase “Wnt 3 signaling pathway” refers to a canonical Wnt pathway that is activated by LRP6 interacting with the Wnt3 or a Wnt3a ligand.

[0072] The phrase “isolated LRP6 construct”, as used herein, refers to an LRP6 construct that is substantially free of other LRP6 constructs having different antigenic specificities (e.g., an isolated LRP6 construct that specifically binds LRP6 is substantially free of constructs that specifically bind antigens other than LRP6). Moreover, an isolated LRP6 construct may be substantially free of other cellular material and/or chemicals. An isolated LRP6 construct that specifically binds LRP6 may, however, have cross-reactivity to other antigens, such as LRP6 molecules from other species. The phrases “monoclonal antibody” or “monoclonal antibody composition” as used herein refers to polypeptides, including antibodies, antibody fragments, bispecific antibodies, etc. that have substantially identical to amino acid sequence or are derived from the same genetic source. This term also includes preparations of antibody molecules of single molecular composition. A monoclonal antibody composition displays a single binding specificity and affinity for a particular epitope.

[0073] The phrase “human antibody”, as used herein, includes antibodies having variable regions in which both the framework and CDR regions are derived from sequences of human origin. Furthermore, if the antibody contains a constant region, the constant region also is derived from such human sequences, e.g., human germline sequences, or mutated versions of human germline sequences or antibody containing consensus framework sequences derived from human framework sequences analysis, for example, as described in Knappik, et al. (2000. J Mol Biol 296, 57-86). The structures and locations of immunoglobulin variable domains, e.g., CDRs, may be defined using well known numbering schemes, e.g., the Kabat numbering scheme, the Chothia numbering scheme, or a combination of Kabat and Chothia (see, e.g., Sequences of Proteins of Immunological Interest, U.S. Department of Health and Human Services (1991), eds. Kabat et al.; Al Lazikani et al., (1997) J. Mol. Bio. 273:927 948); Kabat et al., (1991) Sequences of Proteins of Immunological Interest, 5th edit., NIH Publication no. 91-3242 U.S. Department of Health and Human Services; Chothia et al., (1987) J. Mol. Biol. 196:901-917; Chothia et al., (1989) Nature 342:877-883; and Al-Lazikani et al., (1997) J. Mol. Biol. 273:927-948.

[0074] The human antibodies and human antibody fragments may include amino acid residues not encoded by human sequences (e.g., mutations introduced by random or site-specific mutagenesis in vitro or by somatic mutation in vivo, or a conservative substitution to promote stability or manufacturing). However, the terms “human antibody” and “human antibody fragments”, as used herein, is not intended to include antibodies in which CDR sequences derived from the germline of another mammalian species, such as a mouse, have been grafted onto human framework sequences.

[0075] The phrase “recombinant human antibody”, as used herein, includes all human antibodies that are prepared, expressed, created or isolated by recombinant means, such as antibodies isolated from an animal (e.g., a mouse) that is transgenic or transchromosomal for human immunoglobulin genes or a hybridoma prepared therefrom, antibodies isolated from a host cell transformed to express the human antibody, e.g., from a transfectoma, antibodies isolated from a recombinant, combinatorial human antibody library, and antibodies prepared, expressed, created or isolated by any other means that involve splicing of all or a portion of a human immunoglobulin gene, sequences to other DNA sequences. Such recombinant human antibodies have variable regions in which the framework and CDR regions are derived from human germline immunoglobulin sequences. In certain embodiments, however, such recombinant human antibodies can be subjected to in vitro mutagenesis (or, when an animal transgenic for human Ig sequences is used, in vivo somatic mutagenesis) and thus the amino acid sequences of the V_{H} and V_{L} regions of the recombinant antibodies are sequences that, while derived from and related to human germline V_{H} and V_{L} sequences, may not naturally exist within the human antibody germline repertoire in vivo.

[0076] The term “attachment linker” as used herein refers to a peptide linker that consists of amino acids such as alanine, glycine and serine residues used alone or in combination, to link at least one LRP6 binding moiety (e.g., scFv) to a half-life extender. In one embodiment, the linker is a Gly/Ser linker and comprises the amino acid sequence (Gly-Gly-Ser)₂, i.e., (Glyₙ Ser)ₙ where n is a positive integer equal to or greater than 1. For example, n=1, n=2, n=3. n=4, n=5 and n=6, n=7, n=8, n=9 and n=10. In one embodiment, the linkers include, but are not limited to, (Gly₄ Ser)₄ or (Gly₄Ser)₃. In another embodiment, the linkers Glu and Lys residues interspersed within the Gly-Ser linkers for better solubility. In another embodiment, the linkers include multiple repeats of (Gly₂Ser), (GlySer) or (Gly₃Ser). In another embodiment, the linkers include combinations and multiples of (Gly₃Ser)+(Gly₄Ser)+(GlySer). In another embodiment, Ser can be replaced with Ala e.g., (Gly₄Ala) or (Gly₃Ala). In another embodiment, the linker comprises any combination of Gly, Ser and Pro. In yet another embodiment, the linker comprises the motif (GluAlaAlaAlaLys)ₙ, where n is a positive integer equal to or greater than 1. In another embodiment, the linker is an Ala linker comprising amino acid sequence Ala-Ala-Xₙ, where X can be any amino acid (e.g., Ala, Gly, Ser, Glu, or Val) and n is an integer from 1-20. In another embodiment, no attachment linker is used to link at least one LRP6 binding moiety (e.g., scFv) is to a half-life extender.

[0077] The term “interdomain linker” as used herein refers to a peptide linker that consists of amino acids such as alanine, glycine and serine residues used alone or in combination, to link multiple LRP6 binding moieties together. In one embodiment, the linker is a Gly/Ser linker and comprises the amino acid sequence (Gly-Gly-Ser)₂, i.e., (Glyₙ Ser)ₙ where n is a positive integer equal to or greater than 1. For example, n=1, n=2, n=3. n=4, n=5 and n=6, n=7, n=8, n=9 and n=10. In one embodiment, the linkers include, but are not limited to, (Gly₄ Ser)₄ or (Gly₄Ser)₃. In another embodiment, the linkers Glu and Lys residues interspersed within the Gly-Ser linkers for better solubility. In another embodiment, the linkers include multiple repeats of (Gly₂Ser), (GlySer) or (Gly₃Ser). In another embodiment, the linkers include combinations and multiples of (Gly₃Ser)+(Gly₄Ser)+(GlySer). In another embodiment, Ser can be replaced with Ala e.g., (Gly₄Ala) or (Gly₃Ala). In another embodiment, the linker comprises any combination of Gly, Ser and Pro. In yet another embodiment, the linker comprises the motif (GluAlaAlaAlaLys)ₙ, where n is a positive integer equal to or greater than 1. In another embodiment, the linker is an Ala linker comprising amino acid sequence Ala-Ala-Xₙ, where X can be any amino acid (e.g., Ala, Gly, Ser, Glu, or Val) and n is an integer from 1-20.

[0078] The term “binding site” as used herein comprises an area on the LRP6 target receptor to which the LRP6 binding moiety selectively binds. For example, the binding sites on LRP6 include the β-propeller 1 binding domain, β-propeller 2 binding domain, β-propeller 3 binding domain, and β-propeller 4 binding domain.

[0079] The term “epitope” as used herein refers to any determinant capable of binding with high affinity to an immunoglobulin. An epitope is a region of the LRP6 receptor that is bound by an LRP6 binding moiety (e.g., scFv). Regions of a given polypeptide (e.g., LRP6) that include an epitope can be identified using any number of epitope mapping techniques, well known in the art. See, e.g., Epitope Mapping Protocols in Methods in Molecular Biology, Vol. 66 (Glenn E. Morris, Ed., 1996) Humana Press, Totowa, N.J. For example, linear epitopes may be determined by e.g., concurrently synthesizing large numbers of peptides on solid supports, the peptides corresponding to portions of the protein molecule, and reacting the peptides with antibodies while the peptides are still attached to the supports. Such techniques are known in the art and described in, e.g., U.S. Pat. No. 4,708,871; Geysen et al., (1984) Proc. Natl. Acad. Sci. USA 8:3998-4002; Geysen et al., (1985) Proc. Natl. Acad. Sci. USA 82:78-182; Geysen et al., (1986) Mol. Immunol. 23:709-715. Similarly, conformational epitopes are readily identified by determining spatial conformation of amino acids such as by, e.g., x-ray crystallography and two-dimensional nuclear magnetic resonance. See, e.g., Epitope Mapping Protocols, supra. Antigenic regions of proteins can also be identified using standard antigenicity and hydropathy plots, such as those calculated using, e.g., the Omiga version 1.0 software program available from the Oxford Molecular Group. This computer program employs the Hopp/Woods method, Hopp et al., (1981) Proc. Natl. Acad. Sci USA 78:3824-3828; for determining antigenicity profiles, and the Kyte-Doolittle technique, Kyte et al., (1982) J. MoI. Biol. 157:105-132; for hydropathy plots.

[0080] The term “specific binding” between two entities means a binding with an equilibrium constant (K_{A}) (kₒₙ/k_{off}) of at least 10²M⁻¹, at least 5×10²M⁻¹, at least 10³M⁻¹, at least 5×10³M⁻¹, at least 10⁴M⁻¹ at least 5×10⁴M⁻¹, at least 10⁵M⁻¹, at least 5×10⁵M⁻¹, at least 10⁶M⁻¹, at least 5×10⁶M⁻¹, at least 10⁷M⁻¹, at least 5×10⁷M⁻¹, at least 10⁸M⁻¹, at least 5×10⁸M⁻¹, at least 10⁹M⁻¹, at least 5×10⁹M⁻¹, at least 10¹⁰M⁻¹, at least 5×10¹⁰M⁻¹ at least 10¹¹M⁻¹, at least 5×10¹¹M⁻¹, at least 10¹²M⁻¹, at least 5×10¹²M⁻¹, at least 10¹³M⁻¹, at least 5×10¹³ M⁻¹, at least 10¹⁴M⁻¹, at least 5×10¹⁴M⁻¹, at least 10¹⁵M⁻¹, or at least 5×10¹⁵M⁻¹.

[0081] The phrase “specifically (or selectively) binds” refers to a binding reaction between an LRP6 binding moiety and its cognate antigen (e.g., a human LRP6) that is determinative of the presence of a cognate antigen in a heterogeneous population of proteins and other biologics. In addition to the equilibrium constant (K_{A}) noted above, an LRP6 binding moiety typically also has a dissociation rate constant (K_{D}) (k_{off}/kₒₙ) of less than 5×10⁻²M, less than 10⁻²M, less than 5×10⁻³M, less than 10⁻³M, less than 5×10⁻⁴M, less than 10⁻⁴M, less than 5×10⁻⁵M, less than 10⁻⁵M, less than 5×10⁻⁶M, less than 10⁻⁶M, less than 5×10⁻⁷M, less than 10⁻⁷M, less than 5×10⁻⁸M, less than 10⁻⁸M, less than 5×10⁻⁹M, less than 10⁻⁹M, less than 5×10⁻¹⁰M, less than 10⁻¹⁰M, less than 5×10⁻¹¹M, less than 10⁻¹¹M, less than 5×10⁻¹²M, less than 10⁻¹²M, less than 5×10⁻¹³M, less than 10⁻¹³M, less than 5×10⁻¹⁴M, less than 10⁻¹⁴M, less than 5×10⁻¹⁵M, or less than 10⁻¹⁵M or lower, and binds to LRP6 with an affinity that is at least two-fold greater than its affinity for binding to a non-specific antigen. In one embodiment, the LRP6 binding moiety has dissociation constant (Kₐ) of less than 3000 pM, less than 2500 pM, less than 2000 pM, less than 1500 pM, less than 1000 pM, less than 750 pM, less than 500 pM, less than 250 pM, less than 200 pM, less than 150 pM, less than 100 pM, less than 75 pM, less than 10 pM, less than 1 pM as assessed using a method described herein or known to one of skill in the art (e.g., a BIAcore assay, ELISA, FACS, SET) (Biacore International AB, Uppsala, Sweden).

[0082] The term “K_{assoc}” or “Kₐ”, as used herein, refers to the association rate of a particular LRP6 binding moiety-antigen interaction, whereas the term “K_{dis}” or “K_{d},” as used herein, refers to the dissociation rate of a particular LRP6 binding moiety-antigen interaction. The term “K_{D}”, as used herein, refers to the dissociation constant, which is obtained from the ratio of K_{d} to Kₐ (i.e. K_{d}/Kₐ) and is expressed as a molar concentration (M). K_{D} values for LRP6 binding moieties such as LRP6 antibodies or fragments thereof can be determined using methods well established in the art. A method for determining the K_{D} of an antibody is by using surface plasmon resonance, or using a biosensor system such as a Biacore® system.

[0083] The term “affinity” as used herein refers to the strength of interaction between LRP6 binding moiety and antigen at single antigenic sites. Within each antigenic site, the variable region of the antibody “arm” interacts through weak non-covalent forces with antigen at numerous sites; the more interactions, the stronger the affinity.

[0084] The term “avidity” as used herein refers to an informative measure of the overall stability or strength of the LRP6 binding moiety-LRP6 antigen complex. It is controlled by three major factors: antibody epitope affinity; the valence of both the antigen and antibody; and the structural arrangement of the interacting parts. Ultimately these factors define the specificity of the antibody, that is, the likelihood that the particular antibody is binding to a precise antigen epitope.

[0085] The phrase “inhibit” as used herein refers to an LRP6 construct that binds with LRP6 and reduces, decreases the biological activity of canonical Wnt signaling, e.g., reduces, decreases LRP6 induced signaling activity in a Wnt reporter gene assay, or a phospho LRP6 assay. Examples of assays are described in more details in the examples below. In some embodiments, the LRP6 construct reduces, decreases or inhibits LRP6 induced activity as measured in a Wnt reporter gene assay at an IC₅₀ of 10 nM or less, 1 nM or less, or 100 pM or less, 10 pM, 1 pM, 0.5 pM, 0.1 pM. In some embodiments, the activities of the LRP6 constructs can be measured by binding to LRP6 using SET, ELISA, FACS, Scatchard at an IC₅₀ of 10 nM or less, 1 nM or less, 0.5 pM, or 100 pM or less.

[0086] The term “Wnt 1” as used herein refers to Wnt1, Wnt2, Wnt6, Wnt7a, Wnt7b, Wnt9a, Wnt10a, or Wnt10b.

[0087] The term “Wnt 3a” as used herein refers to Wnt3a and Wnt3.

[0088] The term “potentiate” as used herein refers to a process whereby the Wnt signal is activated and enhanced upon conversion of a fragment of an antibody to a full length IgG LRP6 antibody in the presence of a Wnt ligand. For example, a Wnt 1 Fab binds to the Propeller 1 region of the LRP6 receptor and blocks Wnt 1 pathway in absence of a Wnt ligand, e.g., Wnt 3. In the presence of a Wnt ligand, e.g., Wnt 3, the Wnt 1 Fab blocks signaling through the Wnt 1 pathway, but signal activation may occur through the Wnt 3 pathway, thereby producing a signal. When the Wnt 1 Fab is converted to a full length Wnt 1 IgG, the Wnt 1 IgG binds to the Propeller 1 regions of two LRP6 receptors and blocks the Wnt 1 pathway, however, in the presence of a Wnt ligand, e.g., Wnt 3; signal activation occurs through the Wnt 3 pathway and is also enhanced. While not required to provide a theory of action, one possible mechanism is that the IgG clusters together two or more LRP6 receptors by binding to the Propeller 1 regions of each LRP6 receptor, which in the presence of a Wnt 3 ligand results in a stronger signal through the Wnt 3 pathway. Dimerization of the LRP6 receptors promotes Wnt signaling, perhaps through the increases avidity of the various interactions involving LRP6.

[0089] The reverse results are obtained with a Wnt 3 Fab that binds to the Propeller 3 region of the LRP6 receptor and blocks the Wnt 3 pathway. In the presence of a Wnt 1 ligand, the Wnt 3 Fab blocks the Wnt 3 pathway, but activates the Wnt 1 pathway to generate a signal. When the Wnt 3 Fab is converted to a full length Wnt 3 IgG, the Wnt 3 IgG binds to the Propeller 3 regions of two LRP6 receptors, and in the presence of a Wnt 1 ligand, inhibits signaling through the Wnt 1 pathway.

[0090] The term “no significant potentiation” or “avoids potentiation” refers to a Wnt signal that is not activated or enhanced compared with a control antibody or fragment thereof that binds to the same epitope. No significant potentiation can be at least 10% less than control antibody or fragment thereof, at least 20%, at least 30%, at least 40%, at least 50%, at least 60%, at least 70%, at least 80%, at least 90%, at least 100% less than then control antibody or fragment thereof.

[0091] The term “cluster” as used herein refers to any protein that gathers or groups together LRP6 receptors and potentiates Wnt signaling. Examples of such proteins include, but are not limited to, Wnt 1 ligands, Wnt 3a ligands and Wnt 3 ligands. These proteins can cause multimerization, e.g., dimerization of two endogenous LRP6 receptors. This dimerization may result in increased avidity due to increased interactions of LRP6, which in the presence of a Wnt ligand can potentiate a Wnt signal.

[0092] The phrase “conservatively modified variant” applies to both amino acid and nucleic acid sequences. With respect to particular nucleic acid sequences, conservatively modified variants refers to those nucleic acids which encode identical or essentially identical amino acid sequences, or where the nucleic acid does not encode an amino acid sequence, to essentially identical sequences. Because of the degeneracy of the genetic code, a large number of functionally identical nucleic acids encode any given protein. For instance, the codons GCA, GCC, GCG and GCU all encode the amino acid alanine. Thus, at every position where an alanine is specified by a codon, the codon can be altered to any of the corresponding codons described without altering the encoded polypeptide. Such nucleic acid variations are “silent variations,” which are one species of conservatively modified variations. Every nucleic acid sequence herein which encodes a polypeptide also describes every possible silent variation of the nucleic acid. One of skill will recognize that each codon in a nucleic acid (except AUG, which is ordinarily the only codon for methionine, and TGG, which is ordinarily the only codon for tryptophan) can be modified to yield a functionally identical molecule. Accordingly, each silent variation of a nucleic acid that encodes a polypeptide is implicit in each described sequence.

[0093] For polypeptide sequences, “conservatively modified variants” include individual substitutions, deletions or additions to a polypeptide sequence which result in the substitution of an amino acid with a chemically similar amino acid. Conservative substitution tables providing functionally similar amino acids are well known in the art. Such conservatively modified variants are in addition to and do not exclude polymorphic variants, interspecies homologs, and alleles. The following eight groups contain amino acids that are conservative substitutions for one another: 1) Alanine (A), Glycine (G); 2) Aspartic acid (D), Glutamic acid (E); 3) Asparagine (N), Glutamine (Q); 4) Arginine (R), Lysine (K); 5) Isoleucine (I), Leucine (L), Methionine (M), Valine (V); 6) Phenylalanine (F), Tyrosine (Y), Tryptophan (W); 7) Serine (S), Threonine (T); and 8) Cysteine (C), Methionine (M) (see, e.g., Creighton, Proteins (1984)). In some embodiments, the term “conservative sequence modifications” are used to refer to amino acid modifications that do not significantly affect or alter the binding characteristics of the antibody containing the amino acid sequence.

[0094] The terms “cross-block”, “cross-blocked” and “cross-blocking” are used interchangeably herein to mean the ability of an LRP6 binding moiety e.g., an antibody or fragment to interfere with the binding of other antibodies to LRP6 in a standard competitive binding assay. The ability or extent to which an LRP6 binding moiety is able to interfere with the binding of another binding moiety to LRP6, and therefore whether it can be said to cross-block, can be determined using standard competition binding assays. One suitable assay involves the use of the Biacore technology (e.g. by using the BIAcore 3000 instrument (Biacore, Uppsala, Sweden)), which can measure the extent of interactions using surface plasmon resonance technology. Another assay for measuring cross-blocking uses an ELISA-based approach.

[0095] The term “optimized” as used herein refers to a nucleotide sequence has been altered to encode an amino acid sequence using codons that are preferred in the production cell or organism, generally a eukaryotic cell, for example, a cell of Pichia, a cell of Trichoderma, a Chinese Hamster Ovary cell (CHO) or a human cell. The optimized nucleotide sequence is engineered to retain completely or as much as possible the amino acid sequence originally encoded by the starting nucleotide sequence, which is also known as the “parental” sequence.

[0096] Standard assays to evaluate the binding ability of the antibodies toward antigens of various species are known in the art, including for example, ELISAs, western blots and RIAs. These standard assays are also suitable for the LRP6 constructs and are described in detail in the Examples. The binding kinetics (e.g., binding affinity) of the LRP6 constructs also can be assessed by standard assays known in the art, such as by Biacore analysis, or FACS relative affinity (Scatchard). Assays to evaluate the effects of the LRP6 constructs on functional properties of LRP6 (e.g., receptor binding assays, modulating the Wnt pathway) are described in further detail in the Examples.

[0097] Accordingly, an LRP6 construct that “inhibits” one or more of these LRP6 functional properties (e.g., biochemical, immunochemical, cellular, physiological or other biological activities, or the like) as determined according to methodologies known to the art and described herein, will be understood to relate to a statistically significant decrease in the particular activity relative to that seen in the absence of the LRP6 construct. An LRP6 construct that inhibits LRP6 activity affects such a statistically significant decrease by at least 10% of the measured parameter, by at least 50%, 80% or 90%, and in certain embodiments an LRP6 construct may inhibit greater than 95%, 98% or 99% of LRP6 functional activity.

[0098] The phrases “percent identical” or “percent identity,” in the context of two or more nucleic acids or polypeptide sequences, refers to two or more sequences or subsequences that are the same. Two sequences are “substantially identical” if two sequences have a specified percentage of amino acid residues or nucleotides that are the same (i.e., 60% identity, optionally 65%, 70%, 75%, 80%, 85%, 90%, 95%, 98%, or 99% identity over a specified region, or, when not specified, over the entire sequence), when compared and aligned for maximum correspondence over a comparison window, or designated region as measured using one of the following sequence comparison algorithms or by manual alignment and visual inspection. Optionally, the identity exists over a region that is at least about 50 nucleotides (or 10 amino acids) in length, or more preferably over a region that is 100 to 500 or 1000 or more nucleotides (or 20, 50, 200 or more amino acids) in length.

[0099] For sequence comparison, typically one sequence acts as a reference sequence, to which test sequences are compared. When using a sequence comparison algorithm, test and reference sequences are entered into a computer, subsequence coordinates are designated, if necessary, and sequence algorithm program parameters are designated. Default program parameters can be used, or alternative parameters can be designated. The sequence comparison algorithm then calculates the percent sequence identities for the test sequences relative to the reference sequence, based on the program parameters.

[0100] A “comparison window”, as used herein, includes reference to a segment of any one of the number of contiguous positions selected from the group consisting of from 20 to 600, usually about 50 to about 200, more usually about 100 to about 150 in which a sequence may be compared to a reference sequence of the same number of contiguous positions after the two sequences are optimally aligned. Methods of alignment of sequences for comparison are well known in the art. Optimal alignment of sequences for comparison can be conducted, e.g., by the local homology algorithm of Smith and Waterman (1970) Adv. Appl. Math. 2:482c, by the homology alignment algorithm of Needleman and Wunsch (1970) J. Mol. Biol. 48:443, by the search for similarity method of Pearson and Lipman, (1988) Proc. Nat'l. Acad. Sci. USA 85:2444, by computerized implementations of these algorithms (GAP, BESTFIT, FASTA, and TFASTA in the Wisconsin Genetics Software Package, Genetics Computer Group, 575 Science Dr., Madison, Wis.), or by manual alignment and visual inspection (see, e.g., Brent et al., (2003) Current Protocols in Molecular Biology).

[0101] Two examples of algorithms that are suitable for determining percent sequence identity and sequence similarity are the BLAST and BLAST 2.0 algorithms, which are described in Altschul et al., (1977) Nuc. Acids Res. 25:3389-3402; and Altschul et al., (1990) J. Mol. Biol. 215:403-410, respectively. Software for performing BLAST analyses is publicly available through the National Center for Biotechnology Information. This algorithm involves first identifying high scoring sequence pairs (HSPs) by identifying short words of length W in the query sequence, which either match or satisfy some positive-valued threshold score T when aligned with a word of the same length in a database sequence. T is referred to as the neighborhood word score threshold (Altschul et al., supra). These initial neighborhood word hits act as seeds for initiating searches to find longer HSPs containing them. The word hits are extended in both directions along each sequence for as far as the cumulative alignment score can be increased. Cumulative scores are calculated using, for nucleotide sequences, the parameters M (reward score for a pair of matching residues; always >0) and N (penalty score for mismatching residues; always <0). For amino acid sequences, a scoring matrix is used to calculate the cumulative score. Extension of the word hits in each direction are halted when: the cumulative alignment score falls off by the quantity X from its maximum achieved value; the cumulative score goes to zero or below, due to the accumulation of one or more negative-scoring residue alignments; or the end of either sequence is reached. The BLAST algorithm parameters W, T, and X determine the sensitivity and speed of the alignment. The BLASTN program (for nucleotide sequences) uses as defaults a wordlength (W) of 11, an expectation (E) or 10, M=5, N=−4 and a comparison of both strands. For amino acid sequences, the BLASTP program uses as defaults a wordlength of 3, and expectation (E) of 10, and the BLOSUM62 scoring matrix (see Henikoff and Henikoff, (1989) Proc. Natl. Acad. Sci. USA 89:10915) alignments (B) of 50, expectation (E) of 10, M=5, N=−4, and a comparison of both strands.

[0102] The BLAST algorithm also performs a statistical analysis of the similarity between two sequences (see, e.g., Karlin and Altschul (1993) Proc. Natl. Acad. Sci. USA 90:5873-5787). One measure of similarity provided by the BLAST algorithm is the smallest sum probability (P(N)), which provides an indication of the probability by which a match between two nucleotide or amino acid sequences would occur by chance. For example, a nucleic acid is considered similar to a reference sequence if the smallest sum probability in a comparison of the test nucleic acid to the reference nucleic acid is less than about 0.2, more preferably less than about 0.01, and most preferably less than about 0.001.

[0103] The percent identity between two amino acid sequences can also be determined using the algorithm of E. Meyers and W. Miller (Comput. Appl. Biosci. 4:11-17 (1988)) which has been incorporated into the ALIGN program (version 2.0), using a PAM120 weight residue table, a gap length penalty of 12 and a gap penalty of 4. In addition, the percent identity between two amino acid sequences can be determined using the Needleman and Wunsch (J. Mol, Biol. 48:444-453 (1970)) algorithm which has been incorporated into the GAP program in the GCG software package (available at www.gcg.com), using either a Blossom 62 matrix or a PAM250 matrix, and a gap weight of 16, 14, 12, 10, 8, 6, or 4 and a length weight of 1, 2, 3, 4, 5, or 6.

[0104] Other than percentage of sequence identity noted above, another indication that two nucleic acid sequences or polypeptides are substantially identical is that the polypeptide encoded by the first nucleic acid is immunologically cross reactive with the antibodies raised against the polypeptide encoded by the second nucleic acid, as described below. Thus, a polypeptide is typically substantially identical to a second polypeptide, for example, where the two peptides differ only by conservative substitutions. Another indication that two nucleic acid sequences are substantially identical is that the two molecules or their complements hybridize to each other under stringent conditions, as described below. Yet another indication that two nucleic acid sequences are substantially identical is that the same primers can be used to amplify the sequence.

[0105] The phrase “nucleic acid” is used herein interchangeably with the term “polynucleotide” and refers to deoxyribonucleotides or ribonucleotides and polymers thereof in either single- or double-stranded form. Unless otherwise indicated, a particular nucleic acid sequence also implicitly encompasses conservatively modified variants thereof (e.g., degenerate codon substitutions) and complementary sequences, as well as the sequence explicitly indicated. Specifically, as detailed below, degenerate codon substitutions may be achieved by generating sequences in which the third position of one or more selected (or all) codons is substituted with mixed-base and/or deoxyinosine residues (Batzer et al., (1991) Nucleic Acid Res. 19:5081; Ohtsuka et al., (1985) J. Biol. Chem. 260:2605-2608; and Rossolini et al., (1994) Mol. Cell. Probes 8:91-98).

[0106] The phrase “operably linked” refers to a functional relationship between two or more polynucleotide (e.g., DNA) segments. Typically, it refers to the functional relationship of a transcriptional regulatory sequence to a transcribed sequence. For example, a promoter or enhancer sequence is operably linked to a coding sequence if it stimulates or modulates the transcription of the coding sequence in an appropriate host cell or other expression system. Generally, promoter transcriptional regulatory sequences that are operably linked to a transcribed sequence are physically contiguous to the transcribed sequence, i.e., they are cis-acting. However, some transcriptional regulatory sequences, such as enhancers, need not be physically contiguous or located in close proximity to the coding sequences whose transcription they enhance.

[0107] The terms “polypeptide” and “protein” are used interchangeably herein to refer to a polymer of amino acid residues. The terms apply to amino acid polymers in which one or more amino acid residue is an artificial chemical mimetic of a corresponding naturally occurring amino acid, as well as to naturally occurring amino acid polymers and non-naturally occurring amino acid polymer. Unless otherwise indicated, a particular polypeptide sequence also implicitly encompasses conservatively modified variants thereof.

[0108] The term “subject” includes human and non-human animals. Non-human animals include all vertebrates, e.g., mammals and non-mammals, such as non-human primates, sheep, dog, cow, chickens, amphibians, and reptiles. Except when noted, the terms “patient” or “subject” are used herein interchangeably.

[0109] The term “anti-cancer agent” means any agent that can be used to treat a cell proliferative disorder such as cancer, including cytotoxic agents, chemotherapeutic agents, radiotherapy and radiotherapeutic agents, targeted anti-cancer agents, and immunotherapeutic agents.

[0110] The term “tumor” refers to neoplastic cell growth and proliferation, whether malignant or benign, and all pre-cancerous and cancerous cells and tissues.

[0111] The term “anti-tumor activity” means a reduction in the rate of tumor cell proliferation, viability, or metastatic activity. A possible way of showing anti-tumor activity is to show a decline in growth rate of abnormal cells that arises during therapy or tumor size stability or reduction. Such activity can be assessed using accepted in vitro or in vivo tumor models, including but not limited to xenograft models, allograft models, MMTV models, and other known models known in the art to investigate anti-tumor activity.

[0112] The term “malignancy” refers to a non-benign tumor or a cancer. As used herein, the term “cancer” includes a malignancy characterized by deregulated or uncontrolled cell growth. Exemplary cancers include: carcinomas, sarcomas, leukemias, and lymphomas. The term “cancer” includes primary malignant tumors (e.g., those whose cells have not migrated to sites in the subject's body other than the site of the original tumor) and secondary malignant tumors (e.g., those arising from metastasis, the migration of tumor cells to secondary sites that are different from the site of the original tumor).

[0113] Various aspects are described in further detail in the following sections and subsections.

### LRP6 and the Wnt-Signaling Pathway

[0114] The invention pertains to LRP6 constructs and uses thereof. LRP6 constructs comprise at least one LRP6 binding moiety and at least one half-life extender molecule. These LRP6 constructs bind to at least one binding site on the LRP6 receptor and inhibit Wnt signaling without potentiation of the Wnt signal and aid in diseases associated with canonical Wnt signaling, e.g., cancer.

[0115] The Wnt signaling pathway is important in embryonic development and postnatal tissue maintenance. This is achieved by directing a specific set of genes that control temporal and spatial regulation of cell growth, movement and cell survival (reviewed in Barker and Clevers (2006) Nature Rev. 5:997). Proper regulation of this pathway is important for maintaining tissue homeostasis. Chronic activation of this pathway promotes uncontrolled cell growth and survival and can consequently drive the development of cell proliferative diseases, such as cancer. Alternatively, abnormal inhibition of this pathway can result in many disease states, for example loss of bone mass and other bone diseases. Wnt proteins initiate downstream signaling by interacting with a Frizzled receptor and one of two cell-surface receptors, which are members of the low-density-lipoprotein receptor (LDLR)-related proteins (LRPs): LRP5 and LRP6 (reviewed in He et al., (2004) Development 31:1663-1677).

[0116] The extracellular domains of LRP6 comprise three basic domains: 1) a YWTD (tyrosine, tryptophan, threonine, aspartic acid)-type β-propeller region, 2) an EGF (epidermal growth factor)-like domain, and 3) a LDLR type A (LA) domain.

[0117] The YWTD-type β-propeller region of LRP6 contains six YWTD repeats of 43-50 amino acid residues each and forms a six-bladed β-propeller structure. In LRP6, there are four YWTD-type β-propeller regions that are each followed by an EGF-like domain, which comprises about 40 amino acid residues with conserved cysteine residues, which in turn are followed by three LA domains. (Springer et al., (1998) J. MoI. Biol. 283:837-862; Jeon et al., (2001) Nat. Struct. Biol. 8:499-504). The β-propeller-EGF-like domains may bind extracellular ligands.

[0118] The extracellular domain of LRP6 is defined by amino acid residues 19 to 1246 and contains four β-propeller domains at amino acid residues 43-324, 352-627, 654-929, and 957-1250, which correspond to β-propeller regions 1, 2, 3 and 4, respectively. Propeller domains 1-2 include amino acids 19-629, and Propeller domains 3-4 include amino acids 631-1246.

[0119] Using phage-based panning, LRP6 antibodies have been identified that either inhibit or enhance Wnt signaling, as shown in the Examples. Two classes of LRP6 antagonistic antibodies have been identified. One class of antibodies specifically inhibits Wnt proteins represented by Wnt1, while the second class specifically inhibits Wnt proteins represented by Wnt3a. Epitope mapping experiments indicate that Wnt1-specific and Wnt3a-specific LRP6 antibodies bind to the first propeller and the third propeller of LRP6 respectively, suggesting that Wnt1 and Wnt3a proteins bind to different propellers of LRP6 (See International Serial No. PCT/EP2008/064821 filed Oct. 31, 2008; PCT/EP2011/057200, filed May 6, 2011; and PCT/EP2011/057202, filed May 6, 2011, the contents of which are incorporated herein by reference in their entirety). Additional characterization of the Propeller 3 domain of LRP6 identified residues in this domain responsible for interaction with the antibodies. Antibody binding sites within YWTD-EGF region of Propeller 3 were identified using hydrogen-deuterium exchange (HDx) mass spectrometry (MS) and correspond to a concave surface between blade 1 and 6 of Propeller 3 domain.

[0120] The above identified LRP6 antibodies or fragments thereof have been used to generate the LRP6 constructs of the invention.

### LRP6 Binding Moieties

[0121] The two classes of anti-LRP6 antibodies have previously been described (PCT/EP2011/057200, filed May 6, 2011; and PCT/EP2011/057202, filed May 6, 2011, the contents of which are incorporated herein by reference in their entirety): one class binds to the first propeller region and inhibits Wnt1 class-specific signaling and a second class binds to the third propeller region and inhibits Wnt3 class-specific signaling.

### 1. Antibodies

[0122] In one embodiment, the LRP6 constructs are produced by using at least one antibody linked to an half-life extender such that the LRP6 construct binds to LRP6 and inhibits Wnt signaling without potentiation of the Wnt signal and displays an increased half-life in vitro and in vivo.

[0123] Antibodies include the IgG, IgA, IgM, IgD, and IgE isotypes. Antibodies or antibody fragments thereof, as used herein, contain one or more complementarity determining regions (CDR) or binding peptides that bind to target proteins, glycoproteins, or epitopes present on the exterior or in the interior of target cells.

TABLE 1
Examples of LRP6 Antibodies of the Present Invention

| SEQ ID | | |
|---|---|---|
| NUMBER | Ab region | Sequence |
| MOR08168 | | |
| Prop1 | | |
| SEQ ID NO: 1 | HCDR1 | DYVIN |
| (Kabat) | | |
| SEQ ID NO: 2 | HCDR2 | GISWSGVNTHYADSVKG |
| (Kabat) | | |
| SEQ ID NO: 3 | HCDR3 | LGATANNIRYKFMDV |
| (Kabat) | | |
| SEQ ID NO: 4 | LCDR1 | SGDSLRNKVY |
| (Kabat) | | |
| SEQ ID NO: 5 | LCDR2 | KNNRPS |
| (Kabat) | | |
| SEQ ID NO: 6 | LCDR3 | QSYDGQKSLV |
| (Kabat) | | |
| SEQ ID NO: 7 | HCDR1 | GFTFSDY |
| (Chothia) | | |
| SEQ ID NO: 8 | HCDR2 | SWSGVN |
| (Chothia) | | |
| SEQ ID NO: 9 | HCDR3 | LGATANNIRYKFMDV |
| (Chothia) | | |
| SEQ ID NO: 10 | LCDR1 | DSLRNK |
| (Chothia) | | |
| SEQ ID NO: 11 | LCDR2 | KN |
| (Chothia) | | |
| SEQ ID NO: 12 | LCDR3 | YDGQKSL |
| (Chothia) | | |
| SEQ ID NO: 13 | VL | DIELTQPPSVSVAPGQTARISCSGDSLRNKVYWYQQKPGQAPVLVIYKNNRPSGIPERFSGSNSGNTATLTISGTQA |
| | | EDEADYYCQSYDGQKSLVFGGGTKLTVL |
| SEQ ID NO: 14 | VH | QVQLVESGGGLVQPGGSLRLSCAASGFTFSDYVINWVRQAPGKGLEWVSGISWSGVNTHYADSVKGRFTISRDN |
| | | SKNTLYLQMNSLRAEDTAVYYCARLGATANNIRYKFMDVWGQGTLVTVSS |
| SEQ ID NO: 15 | DNA VL | GATATCGAACTGACCCAGCCGCCTTCAGTGAGCGTTGCACCAGGTCAGACCGCGCGTATCTCGTGTAGCGGC |
| | | GATTCTCTTCGTAATAAGGTTTATTGGTACCAGCAGAAACCCGGGCAGGCGCCAGTTCTTGTGATTTATAAGA |
| | | ATAATCGTCCCTCAGGCATCCCGGAACGCTTTAGCGGATCCAACAGCGGCAACACCGCGACCCTGACCATTAG |
| | | CGGCACTCAGGCGGAAGACGAAGCGGATTATTATTGCCAGTCTTATGATGGTCAGAAGTCTCTTGTGTTTGGC |
| | | GGCGGCACGAAGTTAACCGTCCTA |
| SEQ ID NO: 16 | DNA VH | CAGGTGCAATTGGTGGAAAGCGGCGGCGGCCTGGTGCAACCGGGCGGCAGCCTGCGTCTGAGCTGCGCGGC |
| | | CTCCGGATTTACCTTTTCTGATTATGTTATTAATTGGGTGCGCCAAGCCCCTGGGAAGGGTCTCGAGTGGGTG |
| | | AGCGGTATTTCTTGGTCTGGTGTTAATACTCATTATGCTGATTCTGTTAAGGGTCGTTTTACCATTTCACGTGAT |
| | | AATTCGAAAAACACCCTGTATCTGCAAATGAACAGCCTGCGTGCGGAAGATACGGCCGTGTATTATTGCGCGC |
| | | GTCTTGGTGCTACTGCTAATAATATTCGTTATAAGTTTATGGATGTTTGGGGCCAAGGCACCCTGGTGACGGT |
| | | TAGCTCA |
| SEQ ID NO: 17 | Light Lambda | DIELTQPPSVSVAPGQTARISCSGDSLRNKVYWYQQKPGQAPVLVIYKNNRPSGIPERFSGSNSGNTATLTISGTQA |
| | | EDEADYYCQSYDGQKSLVFGGGTKLTVLGQPKAAPSVTLFPPSSEELQANKATLVCLISDFYPGAVTVAWKADSSP |
| | | VKAGVETTTPSKQSNNKYAASSYLSLTPEQWKSHRSYSCQVTHEGSTVEKTVAPTECS |
| SEQ ID NO: 18 | Heavy IgG1 | QVQLVESGGGLVQPGGSLRLSCAASGFTFSDYVINWVRQAPGKGLEWVSGISWSGVNTHYADSVKGRFTISRDN |
| | LALA | SKNTLYLQMNSLRAEDTAVYYCARLGATANNIRYKFMDVWGQGTLVTVSSASTKGPSVFPLAPSSKSTSGGTAAL |
| | | GCLVKDYFPEPVTVSWNSGALTSGVHTFPAVLQSSGLYSLSSVVTVPSSSLGTQTYICNVNHKPSNTKVDKRVEPKS |
| | | CDKTHTCPPCPAPEAAGGPSVFLFPPKPKDTLMISRTPEVTCVVVDVSHEDPEVKFNWYVDGVEVHNAKTKPREE |
| | | QYNSTYRVVSVLTVLHQDWLNGKEYKCKVSNKALPAPIEKTISKAKGQPREPQVYTLPPSREEMTKNQVSLTCLVK |
| | | GFYPSDIAVEWESNGQPENNYKTTPPVLDSDGSFFLYSKLTVDKSRWQQGNVFSCSVMHEALHNHYTQKSLSLSP |
| | | GK |
| SEQ ID NO: 19 | DNA | GATATCGAACTGACCCAGCCGCCTTCAGTGAGCGTTGCACCAGGTCAGACCGCGCGTATCTCGTGTAGCGGC |
| | Light Lambda | GATTCTCTTCGTAATAAGGTTTATTGGTACCAGCAGAAACCCGGGCAGGCGCCAGTTCTTGTGATTTATAAGA |
| | | ATAATCGTCCCTCAGGCATCCCGGAACGCTTTAGCGGATCCAACAGCGGCAACACCGCGACCCTGACCATTAG |
| | | CGGCACTCAGGCGGAAGACGAAGCGGATTATTATTGCCAGTCTTATGATGGTCAGAAGTCTCTTGTGTTTGGC |
| | | GGCGGCACGAAGTTAACCGTCCTAGGTCAGCCCAAGGCTGCCCCCTCGGTCACTCTGTTCCCGCCCTCCTCTG |
| | | AGGAGCTTCAAGCCAACAAGGCCACACTGGTGTGTCTCATAAGTGACTTCTACCCGGGAGCCGTGACAGTGG |
| | | CCTGGAAGGCAGATAGCAGCCCCGTCAAGGCGGGAGTGGAGACCACCACACCCTCCAAACAAAGCAACAAC |
| | | AAGTACGCGGCCAGCAGCTATCTGAGCCTGACGCCTGAGCAGTGGAAGTCCCACAGAAGCTACAGCTGCCAG |
| | | GTCACGCATGAAGGGAGCACCGTGGAGAAGACAGTGGCCCCTACAGAATGTTCA |
| SEQ ID NO: 20 | DNA | CAGGTGCAATTGGTGGAAAGCGGCGGCGGCCTGGTGCAACCGGGCGGCAGCCTGCGTCTGAGCTGCGCGGC |
| | Heavy IgG1 | CTCCGGATTTACCTTTTCTGATTATGTTATTAATTGGGTGCGCCAAGCCCCTGGGAAGGGTCTCGAGTGGGTG |
| | LALA | AGCGGTATTTCTTGGTCTGGTGTTAATACTCATTATGCTGATTCTGTTAAGGGTCGTTTTACCATTTCACGTGAT |
| | | AATTCGAAAAACACCCTGTATCTGCAAATGAACAGCCTGCGTGCGGAAGATACGGCCGTGTATTATTGCGCGC |
| | | GTCTTGGTGCTACTGCTAATAATATTCGTTATAAGTTTATGGATGTTTGGGGCCAAGGCACCCTGGTGACGGT |
| | | TAGCTCAGCCTCCACCAAGGGTCCATCGGTCTTCCCCCTGGCACCCTCCTCCAAGAGCACCTCTGGGGGCACA |
| | | GCGGCCCTGGGCTGCCTGGTCAAGGACTACTTCCCCGAACCGGTGACGGTGTCGTGGAACTCAGGCGCCCTG |
| | | ACCAGCGGCGTGCACACCTTCCCGGCTGTCCTACAGTCCTCAGGACTCTACTCCCTCAGCAGCGTGGTGACCG |
| | | TGCCCTCCAGCAGCTTGGGCACCCAGACCTACATCTGCAACGTGAATCACAAGCCCAGCAACACCAAGGTGG |
| | | ACAAGAGAGTTGAGCCCAAATCTTGTGACAAAACTCACACATGCCCACCGTGCCCAGCACCTGAAGCAGCGG |
| | | GGGGACCGTCAGTCTTCCTCTTCCCCCCAAAACCCAAGGACACCCTCATGATCTCCCGGACCCCTGAGGTCAC |
| | | ATGCGTGGTGGTGGACGTGAGCCACGAAGACCCTGAGGTCAAGTTCAACTGGTACGTGGACGGCGTGGAGG |
| | | TGCATAATGCCAAGACAAAGCCGCGGGAGGAGCAGTACAACAGCACGTACCGGGTGGTCAGCGTCCTCACC |
| | | GTCCTGCACCAGGACTGGCTGAATGGCAAGGAGTACAAGTGCAAGGTCTCCAACAAAGCCCTCCCAGCCCCC |
| | | ATCGAGAAAACCATCTCCAAAGCCAAAGGGCAGCCCCGAGAACCACAGGTGTACACCCTGCCCCCATCCCGG |
| | | GAGGAGATGACCAAGAACCAGGTCAGCCTGACCTGCCTGGTCAAAGGCTTCTATCCCAGCGACATCGCCGTG |
| | | GAGTGGGAGAGCAATGGGCAGCCGGAGAACAACTACAAGACCACGCCTCCCGTGCTGGACTCCGACGGCTC |
| | | CTTCTTCCTCTACAGCAAGCTCACCGTGGACAAGAGCAGGTGGCAGCAGGGGAACGTCTTCTCATGCTCCGTG |
| | | ATGCATGAGGCTCTGCACAACCACTACACGCAGAAGAGCCTCTCCCTGTCTCCGGGTAAA |
| MOR08545 | | |
| Prop1 | | |
| SEQ ID NO: 21 | HCDR1 | VNGMH |
| (Kabat) | | |
| SEQ ID NO: 22 | HCDR2 | VIDGMGHTYYADSVKG |
| (Kabat) | | |
| SEQ ID NO: 23 | HCDR3 | YDYIKYGAFDP |
| (Kabat) | | |
| SEQ ID NO: 24 | LCDR1 | SGDNIGSKYVH |
| (Kabat) | | |
| SEQ ID NO: 25 | LDCR2 | GDSNRPS |
| (Kabat) | | |
| SEQ ID NO: 26 | LCDR3 | TRTSTPISGV |
| (Kabat) | | |
| SEQ ID NO: 27 | HCDR1 | GFTFSVN |
| (Chothia) | | |
| SEQ ID NO: 28 | HCDR2 | DGMGH |
| (Chothia) | | |
| SEQ ID NO: 29 | HCDR3 | YDYIKYGAFDP |
| (Chothia) | | |
| SEQ ID NO: 30 | LCDR1 | DNIGSKY |
| (Chothia) | | |
| SEQ ID NO: 31 | LDCR2 | GDS |
| (Chothia) | | |
| SEQ ID NO: 32 | LCDR3 | TSTPISG |
| (Chothia) | | |
| SEQ ID NO: 33 | VL | DIELTQPPSVSVAPGQTARISCSGDNIGSKYVHWYQQKPGQAPVLVIYGDSNRPSGIPERFSGSNSGNTATLTISGT |
| | | QAEDEADYYCTRTSTPISGVFGGGTKLTVL |
| SEQ ID NO: 34 | VH | QVQLVESGGGLVQPGGSLRLSCAASGFTFSVNGMHWVRQAPGKGLEWVSVIDGMGHTYYADSVKGRFTISRDN |
| | | SKNTLYLQMNSLRAEDTAVYYCARYDYIKYGAFDPWGQGTLVTVSS |
| SEQ ID NO: 35 | VL Germlined | SYELTQPPSVSVSPGQTASITCSGDNIGSKYVHWYQQKPGQSPVLVIYGDSNRPSGIPERFSGSNSGNTATLTISGT |
| | | QAMDEADYYCTRTSTPISGVFGGGTKLTVL |
| SEQ ID NO: 36 | VH Germlined | EVQLVESGGGLVQPGGSLRLSCAASGFTFSVNGMHWVRQAPGKGLEWVSVIDGMGHTYYADSVKGRFTISRDN |
| | | SKNTLYLQMNSLRAEDTAVYYCARYDYIKYGAFDPWGQGTLVTVSS |
| SEQ ID NO: 37 | DNA VL | GATATCGAACTGACCCAGCCGCCTTCAGTGAGCGTTGCACCAGGTCAGACCGCGCGTATCTCGTGTAGCGGC |
| | | GATAATATTGGTTCTAAGTATGTTCATTGGTACCAGCAGAAACCCGGGCAGGCGCCAGTTCTTGTGATTTATG |
| | | GTGATTCTAATCGTCCCTCAGGCATCCCGGAACGCTTTAGCGGATCCAACAGCGGCAACACCGCGACCCTGAC |
| | | CATTAGCGGCACTCAGGCGGAAGACGAAGCGGATTATTATTGCACTCGTACTTCTACTCCTATTTCTGGTGTGT |
| | | TTGGCGGCGGCACGAAGTTAACCGTTCTT |
| SEQ ID NO: 38 | DNA VH | CAGGTGCAATTGGTGGAAAGCGGCGGCGGCCTGGTGCAACCGGGCGGCAGCCTGCGTCTGAGCTGCGCGGC |
| | | CTCCGGATTTACCTTTTCTGTTAATGGTATGCATTGGGTGCGCCAAGCCCCTGGGAAGGGTCTCGAGTGGGTG |
| | | AGCGTTATTGATGGTATGGGTCATACTTATTATGCTGATTCTGTTAAGGGTCGTTTTACCATTTCACGTGATAA |
| | | TTCGAAAAACACCCTGTATCTGCAAATGAACAGCCTGCGTGCGGAAGATACGGCCGTGTATTATTGCGCGCGT |
| | | TATGATTATATTAAGTATGGTGCTTTTGATCCTTGGGGCCAAGGCACCCTGGTGACGGTTAGCTCA |
| SEQ ID NO: 39 | Light lambda | DIELTQPPSVSVAPGQTARISCSGDNIGSKYVHWYQQKPGQAPVLVIYGDSNRPSGIPERFSGSNSGNTATLTISGT |
| | | QAEDEADYYCTRTSTPISGVFGGGTKLTVLGQPKAAPSVTLFPPSSEELQANKATLVCLISDFYPGAVTVAWKADSS |
| | | PVKAGVETTTPSKQSNNKYAASSYLSLTPEQWKSHRSYSCQVTHEGSTVEKTVAPTEA |
| SEQ ID NO: 40 | Heavy Fab | QVQLVESGGGLVQPGGSLRLSCAASGFTFSVNGMHWVRQAPGKGLEWVSVIDGMGHTYYADSVKGRFTISRDN |
| | | SKNTLYLQMNSLRAEDTAVYYCARYDYIKYGAFDPWGQGTLVTVSSASTKGPSVFPLAPSSKSTSGGTAALGCLVK |
| | | DYFPEPVTVSWNSGALTSGVHTFPAVLQSSGLYSLSSVVTVPSSSLGTQTYICNVNHKPSNTKVDKKVEPKS |
| SEQ ID NO: 41 | DNA Light | GATATCGAACTGACCCAGCCGCCTTCAGTGAGCGTTGCACCAGGTCAGACCGCGCGTATCTCGTGTAGCGGC |
| | lambda | GATAATATTGGTTCTAAGTATGTTCATTGGTACCAGCAGAAACCCGGGCAGGCGCCAGTTCTTGTGATTTATG |
| | | GTGATTCTAATCGTCCCTCAGGCATCCCGGAACGCTTTAGCGGATCCAACAGCGGCAACACCGCGACCCTGAC |
| | | CATTAGCGGCACTCAGGCGGAAGACGAAGCGGATTATTATTGCACTCGTACTTCTACTCCTATTTCTGGTGTGT |
| | | TTGGCGGCGGCACGAAGTTAACCGTTCTTGGCCAGCCGAAAGCCGCACCGAGTGTGACGCTGTTTCCGCCGA |
| | | GCAGCGAAGAATTGCAGGCGAACAAAGCGACCCTGGTGTGCCTGATTAGCGACTTTTATCCGGGAGCCGTGA |
| | | CAGTGGCCTGGAAGGCAGATAGCAGCCCCGTCAAGGCGGGAGTGGAGACCACCACACCCTCCAAACAAAGC |
| | | AACAACAAGTACGCGGCCAGCAGCTATCTGAGCCTGACGCCTGAGCAGTGGAAGTCCCACAGAAGCTACAGC |
| | | TGCCAGGTCACGCATGAGGGGAGCACCGTGGAAAAAACCGTTGCGCCGACTGAGGCC |
| SEQ ID NO: 42 | DNA Heavy | CAGGTGCAATTGGTGGAAAGCGGCGGCGGCCTGGTGCAACCGGGCGGCAGCCTGCGTCTGAGCTGCGCGGC |
| | Fab | CTCCGGATTTACCTTTTCTGTTAATGGTATGCATTGGGTGCGCCAAGCCCCTGGGAAGGGTCTCGAGTGGGTG |
| | | AGCGTTATTGATGGTATGGGTCATACTTATTATGCTGATTCTGTTAAGGGTCGTTTTACCATTTCACGTGATAA |
| | | TTCGAAAAACACCCTGTATCTGCAAATGAACAGCCTGCGTGCGGAAGATACGGCCGTGTATTATTGCGCGCGT |
| | | TATGATTATATTAAGTATGGTGCTTTTGATCCTTGGGGCCAAGGCACCCTGGTGACGGTTAGCTCAGCGTCGA |
| | | CCAAAGGTCCAAGCGTGTTTCCGCTGGCTCCGAGCAGCAAAAGCACCAGCGGCGGCACGGCTGCCCTGGGCT |
| | | GCCTGGTTAAAGATTATTTCCCGGAACCAGTCACCGTGAGCTGGAACAGCGGGGCGCTGACCAGCGGCGTGC |
| | | ATACCTTTCCGGCGGTGCTGCAAAGCAGCGGCCTGTATAGCCTGAGCAGCGTTGTGACCGTGCCGAGCAGCA |
| | | GCTTAGGCACTCAGACCTATATTTGCAACGTGAACCATAAACCGAGCAACACCAAAGTGGATAAAAAAGTGG |
| | | AACCGAAAAGC |
| SEQ ID NO: 43 | VL Germlined | SYELTQPLSVSVALGQTARITCGGDNIGSKYVHWYQQKPGQAPVLVIYGDSNRPSGIPERFSGSNSGNTATLTISRA |
| | | QAGDEADYYCTRTSTPISGVFGGGTKLTVL |
| SEQ ID NO: 44 | VH Germlined | EVQLLESGGGLVQPGGSLRLSCAASGFTFSVNGMHWVRQAPGKGLEWVSVIDGMGHTYYADSVKGRFTISRDN |
| | | SKNTLYLQMNSLRAEDTAVYYCARYDYIKYGAFDPWGQGTLVTVSS |
| SEQ ID NO: 45 | DNA VL | AGCTATGAACTGACCCAGCCGCTGTCTGTGAGCGTGGCGCTGGGCCAGACCGCGCGTATTACCTGCGGTGGC |
| | Germlined | GATAACATTGGCAGCAAATATGTGCATTGGTATCAGCAGAAACCGGGCCAGGCGCCGGTGCTGGTGATTTAT |
| | | GGCGATAGCAACCGTCCGAGCGGCATTCCGGAACGTTTTAGCGGCAGCAACAGCGGCAACACCGCGACCCTG |
| | | ACCATTTCTCGCGCGCAGGCGGGTGATGAAGCGGATTATTATTGCACCCGTACCAGCACCCCGATTAGCGGC |
| | | GTGTTTGGCGGCGGTACGAAGTTAACCGTTCTT |
| SEQ ID NO: 46 | DNA VH | GAGGTGCAATTGCTGGAAAGCGGCGGCGGCCTGGTGCAACCGGGCGGCAGCCTGCGTCTGAGCTGCGCGGC |
| | Germlined | CTCCGGATTTACCTTTTCTGTTAATGGTATGCATTGGGTGCGCCAAGCCCCTGGGAAGGGTCTCGAGTGGGTG |
| | | AGCGTTATTGATGGTATGGGTCATACTTATTATGCTGATTCTGTTAAGGGTCGTTTTACCATTTCACGTGATAA |
| | | TTCGAAAAACACCCTGTATCTGCAAATGAACAGCCTGCGTGCGGAAGATACGGCCGTGTATTATTGCGCGCGT |
| | | TATGATTATATTAAGTATGGTGCTTTTGATCCTTGGGGCCAAGGCACCCTGGTGACGGTTAGCTCA |
| MOR06706 | | |
| Prop1 | | |
| SEQ ID NO: 47 | HCDR1 | DYAIH |
| (Kabat) | | |
| SEQ ID NO: 48 | HCDR2 | GISYSGSSTHYADSVKG |
| (Kabat) | | |
| SEQ ID NO: 49 | HCDR3 | GSHGNIMAKRYFDF |
| (Kabat) | | |
| SEQ ID NO: 50 | LCDR1 | SGDNIRKKYVY |
| (Kabat) | | |
| SEQ ID NO: 51 | LDCR2 | EDSKRPS |
| (Kabat) | | |
| SEQ ID NO: 52 | LCDR3 | STADSGINNGV |
| (Kabat) | | |
| SEQ ID NO: 53 | HCDR1 | GFTFSDY |
| (Chothia) | | |
| SEQ ID NO: 54 | HCDR2 | SYSGSS |
| (Chothia) | | |
| SEQ ID NO: 55 | HCDR3 | GSHGNIMAKRYFDF |
| (Chothia) | | |
| SEQ ID NO: 56 | LCDR1 | DNIRKKY |
| (Chothia) | | |
| SEQ ID NO: 57 | LDCR2 | EDS |
| (Chothia) | | |
| SEQ ID NO: 58 | LCDR3 | ADSGINNG |
| (Chothia) | | |
| SEQ ID NO: 59 | VL | DIELTQPPSVSVAPGQTARISCSGDNIRKKYVYWYQQKPGQAPVLVIYEDSKRPSGIPERFSGSNSGNTATLTISGTQ |
| | | AEDEADYYCSTADSGINNGVFGGGTKLTVL |
| SEQ ID NO: 60 | VH | QVQLVESGGGLVQPGGSLRLSCAASGFTFSDYAIHWVRQAPGKGLEWVSGISYSGSSTHYADSVKGRFTISRDNSK |
| | | NTLYLQMNSLRAEDTAVYYCARGSHGNIMAKRYFDFWGQGTLVTVSS |
| SEQ ID NO: 61 | VL Germlined | SYELTQPPSVSVSPGQTASITCSGDNIRKKYVYWYQQKPGQSPVLVIYEDSKRPSGIPERFSGSNSGNTATLTISGTQ |
| | | AMDEADYYCSTADSGINNGVFGGGTKLTVL |
| SEQ ID NO: 62 | VH Germlined | EVQLVESGGGLVQPGGSLRLSCAASGFTFSDYAIHWVRQAPGKGLEWVSGISYSGSSTHYADSVKGRFTISRDNSK |
| | | NTLYLQMNSLRAEDTAVYYCARGSHGNIMAKRYFDFWGQGTLVTVSS |
| SEQ ID NO: 63 | DNA VL | GATATCGAACTGACCCAGCCGCCTTCAGTGAGCGTTGCACCAGGTCAGACCGCGCGTATCTCGTGTAGCGGC |
| | | GATAATATTCGTAAGAAGTATGTTTATTGGTACCAGCAGAAACCCGGGCAGGCGCCAGTTCTTGTGATTTATG |
| | | AGGATTCTAAGCGTCCCTCAGGCATCCCGGAACGCTTTAGCGGATCCAACAGCGGCAACACCGCGACCCTGA |
| | | CCATTAGCGGCACTCAGGCGGAAGACGAAGCGGATTATTATTGCTCTACTGCTGATTCTGGTATTAATAATGG |
| | | TGTGTTTGGCGGCGGCACGAAGTTAACCGTTCTT |
| SEQ ID NO: 64 | DNA VH | CAGGTGCAATTGGTGGAAAGCGGCGGCGGCCTGGTGCAACCGGGCGGCAGCCTGCGTCTGAGCTGCGCGGC |
| | | CTCCGGATTTACCTTTTCTGATTATGCTATTCATTGGGTGCGCCAAGCCCCTGGGAAGGGTCTCGAGTGGGTG |
| | | AGCGGTATCTCTTATTCTGGTAGCTCTACCCATTATGCGGATAGCGTGAAAGGCCGTTTTACCATTTCACGTGA |
| | | TAATTCGAAAAACACCCTGTATCTGCAAATGAACAGCCTGCGTGCGGAAGATACGGCCGTGTATTATTGCGCG |
| | | CGTGGTTCTCATGGTAATATTATGGCTAAGCGTTATTTTGATTTTTGGGGCCAAGGCACCCTGGTGACGGTTA |
| | | GCTCA |
| SEQ ID NO: 65 | Light Lambda | DIELTQPPSVSVAPGQTARISCSGDNIRKKYVYWYQQKPGQAPVLVIYEDSKRPSGIPERFSGSNSGNTATLTISGTQ |
| | | AEDEADYYCSTADSGINNGVFGGGTKLTVLGQPKAAPSVTLFPPSSEELQANKATLVCLISDFYPGAVTVAWKADS |
| | | SPVKAGVETTTPSKQSNNKYAASSYLSLTPEQWKSHRSYSCQVTHEGSTVEKTVAPTECS |
| SEQ ID NO: 66 | Heavy IgG1 | QVQLVESGGGLVQPGGSLRLSCAASGFTFSDYAIHWVRQAPGKGLEWVSGISYSGSSTHYADSVKGRFTISRDNSK |
| | LALA | NTLYLQMNSLRAEDTAVYYCARGSHGNIMAKRYFDFWGQGTLVTVSSASTKGPSVFPLAPSSKSTSGGTAALGCL |
| | | VKDYFPEPVTVSWNSGALTSGVHTFPAVLQSSGLYSLSSVVTVPSSSLGTQTYICNVNHKPSNTKVDKRVEPKSCDK |
| | | THTCPPCPAPEAAGGPSVFLFPPKPKDTLMISRTPEVTCVVVDVSHEDPEVKFNWYVDGVEVHNAKTKPREEQYN |
| | | STYRVVSVLTVLHQDWLNGKEYKCKVSNKALPAPIEKTISKAKGQPREPQVYTLPPSREEMTKNQVSLTCLVKGFYP |
| | | SDIAVEWESNGQPENNYKTTPPVLDSDGSFFLYSKLTVDKSRWQQGNVFSCSVMHEALHNHYTQKSLSLSPGK |
| SEQ ID NO: 67 | DNA hlamda | GATATCGAACTGACCCAGCCGCCTTCAGTGAGCGTTGCACCAGGTCAGACCGCGCGTATCTCGTGTAGCGGC |
| | | GATAATATTCGTAAGAAGTATGTTTATTGGTACCAGCAGAAACCCGGGCAGGCGCCAGTTCTTGTGATTTATG |
| | | AGGATTCTAAGCGTCCCTCAGGCATCCCGGAACGCTTTAGCGGATCCAACAGCGGCAACACCGCGACCCTGA |
| | | CCATTAGCGGCACTCAGGCGGAAGACGAAGCGGATTATTATTGCTCTACTGCTGATTCTGGTATTAATAATGG |
| | | TGTGTTTGGCGGCGGCACGAAGTTAACCGTCCTAGGTCAGCCCAAGGCTGCCCCCTCGGTCACTCTGTTCCCG |
| | | CCCTCCTCTGAGGAGCTTCAAGCCAACAAGGCCACACTGGTGTGTCTCATAAGTGACTTCTACCCGGGAGCCG |
| | | TGACAGTGGCCTGGAAGGCAGATAGCAGCCCCGTCAAGGCGGGAGTGGAGACCACCACACCCTCCAAACAA |
| | | AGCAACAACAAGTACGCGGCCAGCAGCTATCTGAGCCTGACGCCTGAGCAGTGGAAGTCCCACAGAAGCTAC |
| | | AGCTGCCAGGTCACGCATGAAGGGAGCACCGTGGAGAAGACAGTGGCCCCTACAGAATGTTCA |
| SEQ ID NO: 68 | DNA Heavy | CAGGTGCAATTGGTGGAAAGCGGCGGCGGCCTGGTGCAACCGGGCGGCAGCCTGCGTCTGAGCTGCGCGGC |
| | IgG1 LALA | CTCCGGATTTACCTTTTCTGATTATGCTATTCATTGGGTGCGCCAAGCCCCTGGGAAGGGTCTCGAGTGGGTG |
| | | AGCGGTATCTCTTATTCTGGTAGCTCTACCCATTATGCGGATAGCGTGAAAGGCCGTTTTACCATTTCACGTGA |
| | | TAATTCGAAAAACACCCTGTATCTGCAAATGAACAGCCTGCGTGCGGAAGATACGGCCGTGTATTATTGCGCG |
| | | CGTGGTTCTCATGGTAATATTATGGCCAAGCGTTATTTTGATTTTTGGGGCCAAGGCACCCTGGTGACGGTTA |
| | | GCTCAGCCTCCACCAAGGGTCCATCGGTCTTCCCCCTGGCACCCTCCTCCAAGAGCACCTCTGGGGGCACAGC |
| | | GGCCCTGGGCTGCCTGGTCAAGGACTACTTCCCCGAACCGGTGACGGTGTCGTGGAACTCAGGCGCCCTGAC |
| | | CAGCGGCGTGCACACCTTCCCGGCTGTCCTACAGTCCTCAGGACTCTACTCCCTCAGCAGCGTGGTGACCGTG |
| | | CCCTCCAGCAGCTTGGGCACCCAGACCTACATCTGCAACGTGAATCACAAGCCCAGCAACACCAAGGTGGAC |
| | | AAGAGAGTTGAGCCCAAATCTTGTGACAAAACTCACACATGCCCACCGTGCCCAGCACCTGAAGCAGCGGGG |
| | | GGACCGTCAGTCTTCCTCTTCCCCCCAAAACCCAAGGACACCCTCATGATCTCCCGGACCCCTGAGGTCACATG |
| | | CGTGGTGGTGGACGTGAGCCACGAAGACCCTGAGGTCAAGTTCAACTGGTACGTGGACGGCGTGGAGGTGC |
| | | ATAATGCCAAGACAAAGCCGCGGGAGGAGCAGTACAACAGCACGTACCGGGTGGTCAGCGTCCTCACCGTCC |
| | | TGCACCAGGACTGGCTGAATGGCAAGGAGTACAAGTGCAAGGTCTCCAACAAAGCCCTCCCAGCCCCCATCG |
| | | AGAAAACCATCTCCAAAGCCAAAGGGCAGCCCCGAGAACCACAGGTGTACACCCTGCCCCCATCCCGGGAGG |
| | | AGATGACCAAGAACCAGGTCAGCCTGACCTGCCTGGTCAAAGGCTTCTATCCCAGCGACATCGCCGTGGAGT |
| | | GGGAGAGCAATGGGCAGCCGGAGAACAACTACAAGACCACGCCTCCCGTGCTGGACTCCGACGGCTCCTTCT |
| | | TCCTCTACAGCAAGCTCACCGTGGACAAGAGCAGGTGGCAGCAGGGGAACGTCTTCTCATGCTCCGTGATGC |
| | | ATGAGGCTCTGCACAACCACTACACGCAGAAGAGCCTCTCCCTGTCTCCGGGTAAA |
| MOR06475 | | |
| Prop3 | | |
| SEQ ID NO: 69 | HCDR1 | NRGGGVG |
| (Kabat) | | |
| SEQ ID NO: 70 | HCDR2 | WIDWDDDKSYSTSLKT |
| (Kabat) | | |
| SEQ ID NO: 71 | HCDR3 | MHLPLVFDS |
| (Kabat) | | |
| SEQ ID NO: 72 | LCDR1 | RASQFIGSRYLA |
| (Kabat) | | |
| SEQ ID NO: 73 | LDCR2 | GASNRAT |
| (Kabat) | | |
| SEQ ID NO: 74 | LCDR3 | QQYYDYPQT |
| (Kabat) | | |
| SEQ ID NO: 75 | HCDR1 | GFSLSNRGG |
| (Chothia) | | |
| SEQ ID NO: 76 | HCDR2 | DWDDD |
| (Chothia) | | |
| SEQ ID NO: 77 | HCDR3 | MHLPLVFDS |
| (Chothia) | | |
| SEQ ID NO: 78 | LCDR1 | SQFIGSRY |
| (Chothia) | | |
| SEQ ID NO: 79 | LDCR2 | GAS |
| (Chothia) | | |
| SEQ ID NO: 80 | LCDR3 | YYDYPQ |
| (Chothia) | | |
| SEQ ID NO: 81 | VL | DIVLTQSPATLSLSPGERATLSCRASQFIGSRYLAWYQQKPGQAPRLLIYGASNRATGVPARFSGSGSGTDFTLTISSL |
| | | EPEDFATYYCQQYYDYPQTFGQGTKVEIK |
| SEQ ID NO: 82 | VH | QVQLKESGPALVKPTQTLTLTCTFSGFSLSNRGGGVGWIRQPPGKALEWLAWIDWDDDKSYSTSLKTRLTISKDTS |
| | | KNQVVLTMTNMDPVDTATYYCARMHLPLVFDSWGQGTLVTVSS |
| SEQ ID NO: 83 | DNA VL | GATATCGTGCTGACCCAGAGCCCGGCGACCCTGAGCCTGTCTCCGGGCGAACGTGCGACCCTGAGCTGCAGA |
| | | GCGAGCCAGTTTATTGGTTCTCGTTATCTGGCTTGGTACCAGCAGAAACCAGGTCAAGCACCGCGTCTATTAA |
| | | TTTATGGTGCTTCTAATCGTGCAACTGGGGTCCCGGCGCGTTTTAGCGGCTCTGGATCCGGCACGGATTTTAC |
| | | CCTGACCATTAGCAGCCTGGAACCTGAAGACTTTGCGACTTATTATTGCCAGCAGTATTATGATTATCCTCAGA |
| | | CCTTTGGCCAGGGTACGAAAGTTGAAATTAAA |
| SEQ ID NO: 84 | DNA VH | CAGGTGCAATTGAAAGAAAGCGGCCCGGCCCTGGTGAAACCGACCCAAACCCTGACCCTGACCTGTACCTTTT |
| | | CCGGATTTAGCCTGTCTAATCGTGGTGGTGGTGTGGGTTGGATTCGCCAGCCGCCTGGGAAAGCCCTCGAGT |
| | | GGCTGGCTTGGATCGATTGGGATGATGATAAGTCTTATAGCACCAGCCTGAAAACGCGTCTGACCATTAGCA |
| | | AAGATACTTCGAAAAATCAGGTGGTGCTGACTATGACCAACATGGACCCGGTGGATACGGCCACCTATTATTG |
| | | CGCGCGTATGCATCTTCCTCTTGTTTTTGATTCTTGGGGCCAAGGCACCCTGGTGACGGTTAGCTCA |
| SEQ ID NO: 85 | Light kappa | DIVLTQSPATLSLSPGERATLSCRASQFIGSRYLAWYQQKPGQAPRLLIYGASNRATGVPARFSGSGSGTDFTLTISSL |
| | | EPEDFATYYCQQYYDYPQTFGQGTKVEIKRTVAAPSVFIFPPSDEQLKSGTASVVCLLNNFYPREAKVQWKVDNAL |
| | | QSGNSQESVTEQDSKDSTYSLSSTLTLSKADYEKHKVYACEVTHQGLSSPVTKSFNRGEC |
| SEQ ID NO: 86 | Heavy IgG1 | QVQLKESGPALVKPTQTLTLTCTFSGFSLSNRGGGVGWIRQPPGKALEWLAWIDWDDDKSYSTSLKTRLTISKDTS |
| | LALA | KNQVVLTMTNMDPVDTATYYCARMHLPLVFDSWGQGTLVTVSSASTKGPSVFPLAPSSKSTSGGTAALGCLVKD |
| | | YFPEPVTVSWNSGALTSGVHTFPAVLQSSGLYSLSSVVTVPSSSLGTQTYICNVNHKPSNTKVDKRVEPKSCDKTHT |
| | | CPPCPAPEAAGGPSVFLFPPKPKDTLMISRTPEVTCVVVDVSHEDPEVKFNWYVDGVEVHNAKTKPREEQYNSTY |
| | | RVVSVLTVLHQDWLNGKEYKCKVSNKALPAPIEKTISKAKGQPREPQVYTLPPSREEMTKNQVSLTCLVKGFYPSDI |
| | | AVEWESNGQPENNYKTTPPVLDSDGSFFLYSKLTVDKSRWQQGNVFSCSVMHEALHNHYTQKSLSLSPGK |
| SEQ ID NO: 87 | DNA | GATATCGTGCTGACCCAGAGCCCGGCGACCCTGAGCCTGTCTCCGGGCGAACGTGCGACCCTGAGCTGCAGA |
| | Light kappa | GCGAGCCAGTTTATTGGTTCTCGTTATCTGGCTTGGTACCAGCAGAAACCAGGTCAAGCACCGCGTCTATTAA |
| | | TTTATGGTGCTTCTAATCGTGCAACTGGGGTCCCGGCGCGTTTTAGCGGCTCTGGATCCGGCACGGATTTTAC |
| | | CCTGACCATTAGCAGCCTGGAACCTGAAGACTTTGCGACTTATTATTGCCAGCAGTATTATGATTATCCTCAGA |
| | | CCTTTGGCCAGGGTACGAAAGTTGAAATTAAACGTACGGTGGCTGCACCATCTGTCTTCATCTTCCCGCCATCT |
| | | GATGAGCAGTTGAAATCTGGAACTGCCTCTGTTGTGTGCCTGCTGAATAACTTCTATCCCAGAGAGGCCAAAG |
| | | TACAGTGGAAGGTGGATAACGCCCTCCAATCGGGTAACTCCCAGGAGAGTGTCACAGAGCAGGACAGCAAG |
| | | GACAGCACCTACAGCCTCAGCAGCACCCTGACGCTGAGCAAAGCAGACTACGAGAAACACAAAGTCTACGCC |
| | | TGCGAAGTCACCCATCAGGGCCTGAGCTCGCCCGTCACAAAGAGCTTCAACAGGGGAGAGTGT |
| SEQ ID NO: 88 | DNA | CAGGTGCAATTGAAAGAAAGCGGCCCGGCCCTGGTGAAACCGACCCAAACCCTGACCCTGACCTGTACCTTTT |
| | Heavy IgG1 | CCGGATTTAGCCTGTCTAATCGTGGTGGTGGTGTGGGTTGGATTCGCCAGCCGCCTGGGAAAGCCCTCGAGT |
| | LALA | GGCTGGCTTGGATCGATTGGGATGATGATAAGTCTTATAGCACCAGCCTGAAAACGCGTCTGACCATTAGCA |
| | | AAGATACTTCGAAAAATCAGGTGGTGCTGACTATGACCAACATGGACCCGGTGGATACGGCCACCTATTATTG |
| | | CGCGCGTATGCATCTTCCTCTTGTTTTTGATTCTTGGGGCCAAGGCACCCTGGTGACGGTTAGCTCAGCCTCCA |
| | | CCAAGGGTCCATCGGTCTTCCCCCTGGCACCCTCCTCCAAGAGCACCTCTGGGGGCACAGCGGCCCTGGGCTG |
| | | CCTGGTCAAGGACTACTTCCCCGAACCGGTGACGGTGTCGTGGAACTCAGGCGCCCTGACCAGCGGCGTGCA |
| | | CACCTTCCCGGCTGTCCTACAGTCCTCAGGACTCTACTCCCTCAGCAGCGTGGTGACCGTGCCCTCCAGCAGCT |
| | | TGGGCACCCAGACCTACATCTGCAACGTGAATCACAAGCCCAGCAACACCAAGGTGGACAAGAGAGTTGAGC |
| | | CCAAATCTTGTGACAAAACTCACACATGCCCACCGTGCCCAGCACCTGAAGCAGCGGGGGGACCGTCAGTCTT |
| | | CCTCTTCCCCCCAAAACCCAAGGACACCCTCATGATCTCCCGGACCCCTGAGGTCACATGCGTGGTGGTGGAC |
| | | GTGAGCCACGAAGACCCTGAGGTCAAGTTCAACTGGTACGTGGACGGCGTGGAGGTGCATAATGCCAAGAC |
| | | AAAGCCGCGGGAGGAGCAGTACAACAGCACGTACCGGGTGGTCAGCGTCCTCACCGTCCTGCACCAGGACT |
| | | GGCTGAATGGCAAGGAGTACAAGTGCAAGGTCTCCAACAAAGCCCTCCCAGCCCCCATCGAGAAAACCATCT |
| | | CCAAAGCCAAAGGGCAGCCCCGAGAACCACAGGTGTACACCCTGCCCCCATCCCGGGAGGAGATGACCAAG |
| | | AACCAGGTCAGCCTGACCTGCCTGGTCAAAGGCTTCTATCCCAGCGACATCGCCGTGGAGTGGGAGAGCAAT |
| | | GGGCAGCCGGAGAACAACTACAAGACCACGCCTCCCGTGCTGGACTCCGACGGCTCCTTCTTCCTCTACAGCA |
| | | AGCTCACCGTGGACAAGAGCAGGTGGCAGCAGGGGAACGTCTTCTCATGCTCCGTGATGCATGAGGCTCTGC |
| | | ACAACCACTACACGCAGAAGAGCCTCTCCCTGTCTCCGGGTAAA |
| SEQ ID NO: 89 | VH Germlined | QVTLKESGPALVKPTQTLTLTCTFSGFSLSNRGGGVGWIRQPPGKALEWLAWIDWDDDKSYSTSLKTRLTISKDTS |
| | | KNQVVLTMTNMDPVDTATYYCARMHLPLVFDSWGQGTLVTVSS |
| SEQ ID NO: 90 | VL Germlined | EIVLTQSPATLSLSPGERATLSCRASQFIGSRYLAWYQQKPGQAPRLLIYGASNRATGIPARFSGSGSGTDFTLTISSLE |
| | | PEDFAVYYCQQYYDYPQTFGQGTKVEIK |
| SEQ ID NO: 91 | DNA VH | CAGGTCACACTGAAAGAGTCCGGCCCTGCCCTGGTCAAACCCACCCAGACCCTGACCCTGACATGCACCTTCA |
| | Germlined | GCGGCTTCAGCCTGAGCAACAGAGGCGGCGGAGTGGGCTGGATCAGACAGCCTCCCGGCAAGGCCCTGGAA |
| | | TGGCTGGCCTGGATCGACTGGGACGACGACAAGAGCTACAGCACCAGCCTGAAAACCCGGCTGACCATCAGC |
| | | AAGGACACCAGCAAGAACCAGGTGGTGCTGACCATGACCAACATGGACCCCGTGGACACCGCCACCTACTAC |
| | | TGCGCCCGGATGCATCTGCCCCTGGTGTTCGATAGCTGGGGCCAGGGCACCCTGGTCACCGTCAGCTCA |
| SEQ ID NO: 92 | DNA VL | GAAATCGTGCTGACCCAGAGCCCCGCCACCCTGTCTCTGAGCCCTGGCGAGAGAGCCACCCTGAGCTGCCGG |
| | Germlined | GCCAGCCAGTTCATCGGCAGCAGATACCTGGCTTGGTATCAGCAGAAGCCCGGCCAGGCCCCCAGACTGCTG |
| | | ATCTACGGCGCCAGCAACCGGGCCACCGGCATCCCTGCCAGATTTTCTGGCAGCGGCAGCGGCACCGACTTC |
| | | ACCCTGACCATCAGCAGCCTGGAACCCGAGGACTTCGCCGTGTACTACTGCCAGCAGTACTACGACTACCCCC |
| | | AGACCTTCGGCCAGGGCACCAAGGTGGAAATCAAG |
| MOR08193 | | |
| Prop3 | | |
| SEQ ID NO: 93 | HCDR1 | NRGGGVG |
| (Kabat) | | |
| SEQ ID NO: 94 | HCDR2 | WIDWDDDKSYSTSLKT |
| (Kabat) | | |
| SEQ ID NO: 95 | HCDR3 | MHLPLVFDS |
| (Kabat) | | |
| SEQ ID NO: 96 | LCDR1 | RASQFIGSRYLA |
| (Kabat) | | |
| SEQ ID NO: 97 | LDCR2 | GASNRAT |
| (Kabat) | | |
| SEQ ID NO: 98 | LCDR3 | QQYWSIPIT |
| (Kabat) | | |
| SEQ ID NO: 99 | HCDR1 | GFSLSNRGG |
| (Chothia) | | |
| SEQ ID NO: 100 | HCDR2 | DWDDD |
| (Chothia) | | |
| SEQ ID NO: 101 | HCDR3 | MHLPLVFDS |
| (Chothia) | | |
| SEQ ID NO: 102 | LCDR1 | SQFIGSRY |
| (Chothia) | | |
| SEQ ID NO: 103 | LDCR2 | GAS |
| (Chothia) | | |
| SEQ ID NO: 104 | LCDR3 | YWSIPI |
| (Chothia) | | |
| SEQ ID NO: 105 | VL | DIVLTQSPATLSLSPGERATLSCRASQFIGSRYLAWYQQKPGQAPRLLIYGASNRATGVPARFSGSGSGTDFTLTISSL |
| | | EPEDFAVYYCQQYWSIPITFGQGTKVEIK |
| SEQ ID NO: 106 | VH | QVQLKESGPALVKPTQTLTLTCTFSGFSLSNRGGGVGWIRQPPGKALEWLAWIDWDDDKSYSTSLKTRLTISKDTS |
| | | KNQVVLTMTNMDPVDTATYYCARMHLPLVFDSWGQGTLVTVSS |
| SEQ ID NO: 107 | VL Germlined | EIVLTQSPATLSLSPGERATLSCRASQFIGSRYLAWYQQKPGQAPRLLIYGASNRATGIPARFSGSGSGTDFTLTISSLE |
| | | PEDFAVYYCQQYWSIPITFGQGTKVEIK |
| SEQ ID NO: 108 | VH Germlined | QVTLKESGPALVKPTQTLTLTCTFSGFSLSNRGGGVGWIRQPPGKALEWLAWIDWDDDKSYSTSLKTRLTISKDTS |
| | | KNQVVLTMTNMDPVDTATYYCARMHLPLVFDSWGQGTLVTVSS |
| SEQ ID NO: 109 | DNA VL | GATATCGTGCTGACCCAGAGCCCGGCGACCCTGAGCCTGTCTCCGGGCGAACGTGCGACCCTGAGCTGCAGA |
| | | GCGAGCCAGTTTATTGGTTCTCGTTATCTGGCTTGGTACCAGCAGAAACCAGGTCAAGCACCGCGTCTATTAA |
| | | TTTATGGTGCTTCTAATCGTGCAACTGGGGTCCCGGCGCGTTTTAGCGGCTCTGGATCCGGCACGGATTTTAC |
| | | CCTGACCATTAGCAGCCTGGAACCTGAAGACTTTGCGGTGTATTATTGCCAGCAGTATTGGTCTATTCCTATTA |
| | | CCTTTGGCCAGGGTACGAAAGTTGAAATTAAA |
| SEQ ID NO: 110 | DNA VH | CAGGTGCAATTGAAAGAAAGCGGCCCGGCCCTGGTGAAACCGACCCAAACCCTGACCCTGACCTGTACCTTTT |
| | | CCGGATTTAGCCTGTCTAATCGTGGTGGTGGTGTGGGTTGGATTCGCCAGCCGCCTGGGAAAGCCCTCGAGT |
| | | GGCTGGCTTGGATCGATTGGGATGATGATAAGTCTTATAGCACCAGCCTGAAAACGCGTCTGACCATTAGCA |
| | | AAGATACTTCGAAAAATCAGGTGGTGCTGACTATGACCAACATGGACCCGGTGGATACGGCCACCTATTATTG |
| | | CGCGCGTATGCATCTTCCTCTTGTTTTTGATTCTTGGGGCCAAGGCACCCTGGTGACGGTTAGCTCA |
| SEQ ID NO: 111 | Light kappa | DIVLTQSPATLSLSPGERATLSCRASQFIGSRYLAWYQQKPGQAPRLLIYGASNRATGVPARFSGSGSGTDFTLTISSL |
| | | EPEDFAVYYCQQYWSIPITFGQGTKVEIKRTVAAPSVFIFPPSDEQLKSGTASVVCLLNNFYPREAKVQWKVDNAL |
| | | QSGNSQESVTEQDSKDSTYSLSSTLTLSKADYEKHKVYACEVTHQGLSSPVTKSFNRGEA |
| SEQ ID NO: 112 | Heavy Fab | QVQLKESGPALVKPTQTLTLTCTFSGFSLSNRGGGVGWIRQPPGKALEWLAWIDWDDDKSYSTSLKTRLTISKDTS |
| | | KNQVVLTMTNMDPVDTATYYCARMHLPLVFDSWGQGTLVTVSSASTKGPSVFPLAPSSKSTSGGTAALGCLVKD |
| | | YFPEPVTVSWNSGALTSGVHTFPAVLQSSGLYSLSSVVTVPSSSLGTQTYICNVNHKPSNTKVDKKVEPKS |
| SEQ ID NO: 113 | DNA Light | GATATCGTGCTGACCCAGAGCCCGGCGACCCTGAGCCTGTCTCCGGGCGAACGTGCGACCCTGAGCTGCAGA |
| | kappa | GCGAGCCAGTTTATTGGTTCTCGTTATCTGGCTTGGTACCAGCAGAAACCAGGTCAAGCACCGCGTCTATTAA |
| | | TTTATGGTGCTTCTAATCGTGCAACTGGGGTCCCGGCGCGTTTTAGCGGCTCTGGATCCGGCACGGATTTTAC |
| | | CCTGACCATTAGCAGCCTGGAACCTGAAGACTTTGCGGTGTATTATTGCCAGCAGTATTGGTCTATTCCTATTA |
| | | CCTTTGGCCAGGGTACGAAAGTTGAAATTAAACGTACGGTGGCTGCTCCGAGCGTGTTTATTTTTCCGCCGAG |
| | | CGATGAACAACTGAAAAGCGGCACGGCGAGCGTGGTGTGCCTGCTGAACAACTTTTATCCGCGTGAAGCGAA |
| | | AGTTCAGTGGAAAGTAGACAACGCGCTGCAAAGCGGCAACAGCCAGGAAAGCGTGACCGAACAGGATAGCA |
| | | AAGATAGCACCTATTCTCTGAGCAGCACCCTGACCCTGAGCAAAGCGGATTATGAAAAACATAAAGTGTATGC |
| | | GTGCGAAGTGACCCATCAAGGTCTGAGCAGCCCGGTGACTAAATCTTTTAATCGTGGCGAGGCC |
| SEQ ID NO: 114 | DNA Heavy | CAGGTGCAATTGAAAGAAAGCGGCCCGGCCCTGGTGAAACCGACCCAAACCCTGACCCTGACCTGTACCTTTT |
| | Fab | CCGGATTTAGCCTGTCTAATCGTGGTGGTGGTGTGGGTTGGATTCGCCAGCCGCCTGGGAAAGCCCTCGAGT |
| | | GGCTGGCTTGGATCGATTGGGATGATGATAAGTCTTATAGCACCAGCCTGAAAACGCGTCTGACCATTAGCA |
| | | AAGATACTTCGAAAAATCAGGTGGTGCTGACTATGACCAACATGGACCCGGTGGATACGGCCACCTATTATTG |
| | | CGCGCGTATGCATCTTCCTCTTGTTTTTGATTCTTGGGGCCAAGGCACCCTGGTGACGGTTAGCTCAGCGTCGA |
| | | CCAAAGGTCCAAGCGTGTTTCCGCTGGCTCCGAGCAGCAAAAGCACCAGCGGCGGCACGGCTGCCCTGGGCT |
| | | GCCTGGTTAAAGATTATTTCCCGGAACCAGTCACCGTGAGCTGGAACAGCGGGGCGCTGACCAGCGGCGTGC |
| | | ATACCTTTCCGGCGGTGCTGCAAAGCAGCGGCCTGTATAGCCTGAGCAGCGTTGTGACCGTGCCGAGCAGCA |
| | | GCTTAGGCACTCAGACCTATATTTGCAACGTGAACCATAAACCGAGCAACACCAAAGTGGATAAAAAAGTGG |
| | | AACCGAAAAGC |
| MOR08473 | | |
| Prop3 | | |
| SEQ ID NO: 115 | HCDR1 | SYGMS |
| (Kabat) | | |
| SEQ ID NO: 116 | HCDR2 | NISNDGHYTYYADSVKG |
| (Kabat) | | |
| SEQ ID NO: 117 | HCDR3 | FQASYLDIMDY |
| (Kabat) | | |
| SEQ ID NO: 118 | LCDR1 | SGDNIGSKYVH |
| (Kabat) | | |
| SEQ ID NO: 119 | LDCR2 | NDSNRPS |
| (Kabat) | | |
| SEQ ID NO: 120 | LCDR3 | QAWGDNGTRV |
| (Kabat) | | |
| SEQ ID NO: 121 | HCDR1 | GFTFSSY |
| (Chothia) | | |
| SEQ ID NO: 122 | HCDR2 | SNDGHY |
| (Chothia) | | |
| SEQ ID NO: 123 | HCDR3 | FQASYLDIMDY |
| (Chothia) | | |
| SEQ ID NO: 124 | LCDR1 | DNIGSKY |
| (Chothia) | | |
| SEQ ID NO: 125 | LDCR2 | NDS |
| (Chothia) | | |
| SEQ ID NO: 126 | LCDR3 | WGDNGTR |
| (Chothia) | | |
| SEQ ID NO: 127 | VL | DIELTQPPSVSVAPGQSITISCSGDNIGSKYVHWYQQKPGQAPVLVIYNDSNRPSGIPERFSGSNSGNTATLTISGTQ |
| | | AEDEADYYCQAWGDNGTRVFGGGTKLTVL |
| SEQ ID NO: 128 | VH | QVQLVESGGGLVQPGGSLRLSCAASGFTFSSYGMSWVRQAPGKGLEWVSNISNDGHYTYYADSVKGRFTISRDN |
| | | SKNTLYLQMNSLRAEDTAVYYCARFQASYLDIMDYWGQGTLVTVSS |
| SEQ ID NO: 129 | VL Germlined | SYELTQPPSVSVSPGQTASITCSGDNIGSKYVHWYQQKPGQSPVLVIYNDSNRPSGIPERFSGSNSGNTATLTISGT |
| | | QAMDEADYYCQAWGDNGTRVFGGGTKLTVL |
| SEQ ID NO: 130 | VH Germlined | EVQLVESGGGLVQPGGSLRLSCAASGFTFSSYGMSWVRQAPGKGLEWVSNISNDGHYTYYADSVKGRFTISRDNS |
| | | KNTLYLQMNSLRAEDTAVYYCARFQASYLDIMDYWGQGTLVTVSS |
| SEQ ID NO: 131 | DNA VL | GATATCGAACTGACCCAGCCGCCTTCAGTGAGCGTTGCACCAGGTCAGAGCATTACCATCTCGTGTAGCGGCG |
| | | ATAATATTGGTTCTAAGTATGTTCATTGGTACCAGCAGAAACCCGGGCAGGCGCCAGTTCTTGTGATTTATAAT |
| | | GATTCTAATCGTCCCTCAGGCATCCCGGAACGCTTTAGCGGATCCAACAGCGGCAACACCGCGACCCTGACCA |
| | | TTAGCGGCACTCAGGCGGAAGACGAAGCGGATTATTATTGCCAGGCTTGGGGTGATAATGGTACTCGTGTGT |
| | | TTGGCGGCGGCACGAAGTTAACCGTTCTT |
| SEQ ID NO: 132 | DNA VH | CAGGTGCAATTGGTGGAAAGCGGCGGCGGCCTGGTGCAACCGGGCGGCAGCCTGCGTCTGAGCTGCGCGGC |
| | | CTCCGGATTTACCTTTTCTTCTTATGGTATGTCTTGGGTGCGCCAAGCCCCTGGGAAGGGTCTCGAGTGGGTG |
| | | AGCAATATTTCTAATGATGGTCATTATACTTATTATGCTGATTCTGTTAAGGGTCGTTTTACCATTTCACGTGAT |
| | | AATTCGAAAAACACCCTGTATCTGCAAATGAACAGCCTGCGTGCGGAAGATACGGCCGTGTATTATTGCGCGC |
| | | GTTTTCAGGCTTCTTATCTTGATATTATGGATTATTGGGGCCAAGGCACCCTGGTGACGGTTAGCTCA |
| SEQ ID NO: 133 | Light lambda | DIELTQPPSVSVAPGQSITISCSGDNIGSKYVHWYQQKPGQAPVLVIYNDSNRPSGIPERFSGSNSGNTATLTISGTQ |
| | | AEDEADYYCQAWGDNGTRVFGGGTKLTVLGQPKAAPSVTLFPPSSEELQANKATLVCLISDFYPGAVTVAWKADS |
| | | SPVKAGVETTTPSKQSNNKYAASSYLSLTPEQWKSHRSYSCQVTHEGSTVEKTVAPTEA |
| SEQ ID NO: 134 | Heavy Fab | QVQLVESGGGLVQPGGSLRLSCAASGFTFSSYGMSWVRQAPGKGLEWVSNISNDGHYTYYADSVKGRFTISRDN |
| | | SKNTLYLQMNSLRAEDTAVYYCARFQASYLDIMDYWGQGTLVTVSSASTKGPSVFPLAPSSKSTSGGTAALGCLVK |
| | | DYFPEPVTVSWNSGALTSGVHTFPAVLQSSGLYSLSSVVTVPSSSLGTQTYICNVNHKPSNTKVDKKVEPKS |
| SEQ ID NO: 135 | DNA Light | GATATCGAACTGACCCAGCCGCCTTCAGTGAGCGTTGCACCAGGTCAGAGCATTACCATCTCGTGTAGCGGCG |
| | lambda | ATAATATTGGTTCTAAGTATGTTCATTGGTACCAGCAGAAACCCGGGCAGGCGCCAGTTCTTGTGATTTATAAT |
| | | GATTCTAATCGTCCCTCAGGCATCCCGGAACGCTTTAGCGGATCCAACAGCGGCAACACCGCGACCCTGACCA |
| | | TTAGCGGCACTCAGGCGGAAGACGAAGCGGATTATTATTGCCAGGCTTGGGGTGATAATGGTACTCGTGTGT |
| | | TTGGCGGCGGCACGAAGTTAACCGTTCTTGGCCAGCCGAAAGCCGCACCGAGTGTGACGCTGTTTCCGCCGA |
| | | GCAGCGAAGAATTGCAGGCGAACAAAGCGACCCTGGTGTGCCTGATTAGCGACTTTTATCCGGGAGCCGTGA |
| | | CAGTGGCCTGGAAGGCAGATAGCAGCCCCGTCAAGGCGGGAGTGGAGACCACCACACCCTCCAAACAAAGC |
| | | AACAACAAGTACGCGGCCAGCAGCTATCTGAGCCTGACGCCTGAGCAGTGGAAGTCCCACAGAAGCTACAGC |
| | | TGCCAGGTCACGCATGAGGGGAGCACCGTGGAAAAAACCGTTGCGCCGACTGAGGCC |
| SEQ ID NO: 136 | DNA Heavy | CAGGTGCAATTGGTGGAAAGCGGCGGCGGCCTGGTGCAACCGGGCGGCAGCCTGCGTCTGAGCTGCGCGGC |
| | Fab | CTCCGGATTTACCTTTTCTTCTTATGGTATGTCTTGGGTGCGCCAAGCCCCTGGGAAGGGTCTCGAGTGGGTG |
| | | AGCAATATTTCTAATGATGGTCATTATACTTATTATGCTGATTCTGTTAAGGGTCGTTTTACCATTTCACGTGAT |
| | | AATTCGAAAAACACCCTGTATCTGCAAATGAACAGCCTGCGTGCGGAAGATACGGCCGTGTATTATTGCGCGC |
| | | GTTTTCAGGCTTCTTATCTTGATATTATGGATTATTGGGGCCAAGGCACCCTGGTGACGGTTAGCTCAGCGTC |
| | | GACCAAAGGTCCAAGCGTGTTTCCGCTGGCTCCGAGCAGCAAAAGCACCAGCGGCGGCACGGCTGCCCTGG |
| | | GCTGCCTGGTTAAAGATTATTTCCCGGAACCAGTCACCGTGAGCTGGAACAGCGGGGCGCTGACCAGCGGCG |
| | | TGCATACCTTTCCGGCGGTGCTGCAAAGCAGCGGCCTGTATAGCCTGAGCAGCGTTGTGACCGTGCCGAGCA |
| | | GCAGCTTAGGCACTCAGACCTATATTTGCAACGTGAACCATAAACCGAGCAACACCAAAGTGGATAAAAAAG |
| | | TGGAACCGAAAAGC |
| SEQ ID NO: 137 | VL Germlined | SYELTQPLSVSVALGQTARITCGGDNIGSKYVHWYQQKPGQAPVLVIYNDSNRPSGIPERFSGSNSGNTATLTISRA |
| | | QAGDEADYYCQAWGDNGTRVFGGGTKLTVL |
| SEQ ID NO: 138 | VH Germlined | EVQLLESGGGLVQPGGSLRLSCAASGFTFSSYGMSWVRQAPGKGLEWVSNISNDGHYTYYADSVKGRFTISRDNS |
| | | KNTLYLQMNSLRAEDTAVYYCARFQASYLDIMDYWGQGTLVTVSS |
| SEQ ID NO: 139 | DNA VL | AGCTATGAACTGACCCAGCCGCTGAGTGTTAGCGTTGCGCTGGGTCAGACCGCGCGTATTACCTGCGGCGGT |
| | Germlined | GATAACATTGGCAGCAAATATGTGCATTGGTATCAGCAGAAACCGGGCCAGGCGCCGGTGCTGGTGATTTAT |
| | | AACGATAGCAACCGTCCGAGCGGCATTCCGGAACGTTTTAGCGGCAGCAACAGCGGCAATACCGCGACCCTG |
| | | ACCATTAGCCGTGCGCAGGCGGGTGATGAAGCGGATTATTATTGCCAGGCGTGGGGCGATAATGGTACGCG |
| | | TGTGTTTGGCGGTGGTACGAAGTTAACCGTTCTT |
| SEQ ID NO: 140 | DNA VH | GAGGTGCAATTGCTGGAAAGCGGCGGCGGCCTGGTGCAACCGGGCGGCAGCCTGCGTCTGAGCTGCGCGGC |
| | Germlined | CTCCGGATTTACCTTTTCTTCTTATGGTATGTCTTGGGTGCGCCAAGCCCCTGGGAAGGGTCTCGAGTGGGTG |
| | | AGCAATATTTCTAATGATGGTCATTATACTTATTATGCTGATTCTGTTAAGGGTCGTTTTACCATTTCACGTGAT |
| | | AATTCGAAAAACACCCTGTATCTGCAAATGAACAGCCTGCGTGCGGAAGATACGGCCGTGTATTATTGCGCGC |
| | | GTTTTCAGGCTTCTTATCTTGATATTATGGATTATTGGGGCCAAGGCACCCTGGTGACGGTTAGCTCA |
| Biparatopic | | |
| construction | | |
| MOR06475 | | |
| SEQ ID NO: 141 | DNA VL- | Gatatcgttctgacccagagtccggcaaccctgagcctgagtccgggtgaacgtgccaccctgagctgtcgtgcaagccagtttattggtagccg |
| | (GGGGS)3-VH | ttatctggcatggtatcagcagaaaccgggtcaggcaccgcgtctgctgatttatggtgcaagcaatcgtgcaaccggtgttccggcacgttttag |
| | scFv | cggtagcggtagtggcaccgattttaccctgaccattagcagcctggaaccggaagattttgcaacctattattgccagcagtattatgattatcc |
| | | gcagacctttggtcagggcaccaaggtggaaattaaaggtggtggtggtagcggtggtggtggctcaggtggtggcggtagtcaggttcaattg |
| | | aaagaaagcggtccggcactggttaaaccgacccagaccctgaccctgacatgtacctttagcggttttagcctgagcaatcgtggtggtggtgt |
| | | tggttggattcgtcagcctccgggtaaagcactggaatggctggcatggattgattgggatgatgataaaagctatagcaccagcctgaaaacc |
| | | cgtctgaccattagtaaagataccagcaaaaatcaggtggttctgaccatgaccaatatggatccggttgataccgccacctattattgtgcacgt |
| | | atgcatctgccgctggtttttgatagctggggtcagggtacactagttaccgttagcagc |
| SEQ ID NO: 142 | VL-(GGGGS)3- | DIVLTQSPATLSLSPGERATLSCRASQFIGSRYLAWYQQKPGQAPRLLIYGASNRATGVPARFSGSGSGTDFTLTISSL |
| | VH scFv | EPEDFATYYCQQYYDYPQTFGQGTKVEIKGGGGSGGGGSGGGGSQVQLKESGPALVKPTQTLTLTCTFSGFSLSN |
| | | RGGGVGWIRQPPGKALEWLAWIDWDDDKSYSTSLKTRLTISKDTSKNQVVLTMTNMDPVDTATYYCARMHLPL |
| | | VFDSWGQGTLVTVSS |
| SEQ ID NO: 143 | DNA VL- | Gatatcgtgctgacacagagccctgccaccctgtctctgagccctggcgagagagccaccctgagctgccgggccagccagttcatcggctccc |
| | (GGGGS)4-VH | gctacctggcctggtatcagcagaagcccggacaggctcccagactgctgatctacggcgccagcaacagagctaccggcgtgcccgccagatt |
| | scFv | ttctggcagcggcagcggcaccgacttcaccctgaccatcagcagcctggaacccgaggacttcgccacctactactgccagcagtactacgac |
| | | tacccccagaccttcggccagggcaccaaggtggagatcaagggcggaggcggatccgggggtggcggaagtggaggcggaggaagcggag |
| | | ggggcggaagccaggtgcaattgaaagagtccggccctgccctggtgaagcctacccagaccctgaccctgacatgcaccttcagcggcttcag |
| | | cctgagcaacagaggcggcggagtgggctggatcagacagcctcccggcaaggccctggaatggctggcctggatcgactgggacgacgaca |
| | | agagctacagcaccagcctgaaaacccggctgaccatctccaaggacaccagcaagaaccaggtggtgctcaccatgaccaacatggacccc |
| | | gtggacaccgccacctattattgcgcccggatgcatctgcccctggtgttcgatagctggggccagggaaccctggtgacagtgtccagc |
| SEQ ID NO: 144 | VL-(GGGGS)4- | DIVLTQSPATLSLSPGERATLSCRASQFIGSRYLAWYQQKPGQAPRLLIYGASNRATGVPARFSGSGSGTDFTLTISSL |
| | VH scFv | EPEDFATYYCQQYYDYPQTFGQGTKVEIKGGGGSGGGGSGGGGSGGGGSQVQLKESGPALVKPTQTLTLTCTFS |
| | | GFSLSNRGGGVGWIRQPPGKALEWLAWIDWDDDKSYSTSLKTRLTISKDTSKNQVVLTMTNMDPVDTATYYCAR |
| | | MHLPLVFDSWGQGTLVTVSS |
| SEQ ID NO: 145 | DNA VH- | Caggttcaattgaaagaaagcggtccggcactggttaaaccgacccagaccctgaccctgacatgtacctttagcggttttagcctgagcaatc |
| | (GGGGS)3-VL | gtggtggtggtgttggttggattcgtcagcctccgggtaaagcactggaatggctggcatggattgattgggatgatgataaaagctatagcacc |
| | scFv | agcctgaaaacccgtctgaccattagcaaagataccagcaaaaatcaggttgttctgaccatgaccaatatggatccggttgataccgcaacct |
| | | attattgtgcacgtatgcatctgccgctggtttttgatagctggggtcagggtacactagttaccgttagcagcggtggtggtggtagcggtggtg |
| | | gcggttcaggtggtggtggcagtgatatcgttctgacccagagtccggcaaccctgagcctgagtccgggtgaacgtgccaccctgagctgtcgt |
| | | gcaagccagtttattggtagccgttatctggcatggtatcagcagaaaccgggtcaggcaccgcgtctgctgatttatggtgcaagcaatcgtgc |
| | | aaccggtgttccggcacgttttagcggtagcggtagtggcaccgattttaccctgaccattagtagcctggaaccggaagattttgccacctatta |
| | | ttgccagcagtattatgattatccgcagacctttggtcagggcaccaaggtggaaattaaa |
| SEQ ID NO: 146 | VH-(GGGGS)3- | QVQLKESGPALVKPTQTLTLTCTFSGFSLSNRGGGVGWIRQPPGKALEWLAWIDWDDDKSYSTSLKTRLTISKDTS |
| | VL scFv | KNQVVLTMTNMDPVDTATYYCARMHLPLVFDSWGQGTLVTVSSGGGGSGGGGSGGGGSDIVLTQSPATLSLSP |
| | | GERATLSCRASQFIGSRYLAWYQQKPGQAPRLLIYGASNRATGVPARFSGSGSGTDFTLTISSLEPEDFATYYCQQY |
| | | YDYPQTFGQGTKVEIK |
| SEQ ID NO: 147 | DNA VH- | Caggttcaattgaaagaaagcggtccggcactggttaaaccgacccagaccctgaccctgacatgtacctttagcggttttagcctgagcaatc |
| | (GGGGS)4-VL | gtggtggtggtgttggttggattcgtcagcctccgggtaaagcactggaatggctggcatggattgattgggatgatgataaaagctatagcacc |
| | scFv | agcctgaaaacccgtctgaccattagcaaagataccagcaaaaatcaggttgttctgaccatgaccaatatggatccggttgataccgcaacct |
| | | attattgtgcacgtatgcatctgccgctggtttttgatagctggggtcagggtacactagttaccgttagcagcggtggtggtggtagcggtggtg |
| | | gcggttcaggtggtggtggcagtggcggtggtggtagtgatatcgttctgacccagagtccggcaaccctgagcctgagtccgggtgaacgtgcc |
| | | accctgagctgtcgtgcaagccagtttattggtagccgttatctggcatggtatcagcagaaaccgggtcaggcaccgcgtctgctgatttatggt |
| | | gcaagcaatcgtgcaaccggtgttccggcacgttttagcggtagcggtagtggcaccgattttaccctgaccattagtagcctggaaccggaaga |
| | | ttttgccacctattattgccagcagtattatgattatccgcagacctttggtcagggcaccaaggtggaaattaaa |
| SEQ ID NO: 148 | VH-(GGGGS)4- | QVQLKESGPALVKPTQTLTLTCTFSGFSLSNRGGGVGWIRQPPGKALEWLAWIDWDDDKSYSTSLKTRLTISKDTS |
| | VL scFv | KNQVVLTMTNMDPVDTATYYCARMHLPLVFDSWGQGTLVTVSSGGGGSGGGGSGGGGSGGGGSDIVLTQSPA |
| | | TLSLSPGERATLSCRASQFIGSRYLAWYQQKPGQAPRLLIYGASNRATGVPARFSGSGSGTDFTLTISSLEPEDFATYY |
| | | CQQYYDYPQTFGQGTKVEIK |
| MOR08168 | | |
| SEQ ID NO: 149 | DNA VL- | Gatatcgaactgacccagcctccgagcgttagcgttgcaccgggtcagaccgcacgtattagctgtagcggtgatagcctgcgtaataaagttta |
| | (GGGGS)3-VH | ttggtatcagcagaaaccgggtcaggcaccggttctggttatttataaaaataatcgtccgagcggtattccggaacgttttagcggtagcaata |
| | scFv | gcggtaataccgcaaccctgaccattagcggcacccaggcagaagatgaagcagattattattgccagagctatgatggtcagaaaagcctgg |
| | | tttttggtggtggcaccaagcttaccgttctgggtggtggtggtagcggtggtggtggctcaggtggtggcggttctcaggttcaattggttgaaag |
| | | tggtggtggtctggttcagcctggtggtagcctgcgtctgagctgtgcagcaagcggttttacctttagcgattatgtgattaattgggttcgccag |
| | | gcaccgggtaaaggtctggaatgggttagcggtattagctggtcaggtgttaatacccattatgcagatagcgtgaaaggtcgttttaccattag |
| | | ccgtgataatagcaaaaataccctgtatctgcagatgaatagcctgcgtgcagaagataccgcagtttattattgtgcacgtctgggtgcaaccg |
| | | caaataatattcgctataaatttatggatgtgtggggtcagggtacactagttaccgttagcagc |
| SEQ ID NO: 150 | VL-(GGGGS)3- | DIELTQPPSVSVAPGQTARISCSGDSLRNKVYWYQQKPGQAPVLVIYKNNRPSGIPERFSGSNSGNTATLTISGTQA |
| | VH scFv | EDEADYYCQSYDGQKSLVFGGGTKLTVLGGGGSGGGGSGGGGSQVQLVESGGGLVQPGGSLRLSCAASGFTFSD |
| | | YVINWVRQAPGKGLEWVSGISWSGVNTHYADSVKGRFTISRDNSKNTLYLQMNSLRAEDTAVYYCARLGATANN |
| | | IRYKFMDVWGQGTLVTVSS |
| SEQ ID NO: 151 | DNA VL- | Gatatcgaactgacccagcctccgagcgttagcgttgcaccgggtcagaccgcacgtattagctgtagcggtgatagcctgcgtaataaagttta |
| | (GGGGS)4-VH | ttggtatcagcagaaaccgggtcaggcaccggttctggttatttataaaaataatcgtccgagcggtattccggaacgttttagcggtagcaata |
| | scFv | gcggtaataccgcaaccctgaccattagcggcacccaggcagaagatgaagcagattattattgccagagctatgatggtcagaaaagcctgg |
| | | tttttggtggtggcaccaagcttaccgttctgggtggtggtggtagcggtggtggtggctcaggtggtggcggttctggtggcggtggttcacaggt |
| | | tcaattggttgaaagtggtggtggtctggttcagcctggtggtagcctgcgtctgagctgtgcagcaagcggttttacctttagcgattatgtgatt |
| | | aattgggttcgccaggcaccgggtaaaggtctggaatgggttagcggtattagctggtcaggtgttaatacccattatgcagatagcgtgaaag |
| | | gtcgttttaccattagccgtgataatagcaaaaataccctgtatctgcagatgaatagcctgcgtgcagaagataccgcagtttattattgtgcac |
| | | gtctgggtgcaaccgcaaataatattcgctataaatttatggatgtgtggggtcagggtacactagttaccgttagcagc |
| SEQ ID NO: 152 | VL-(GGGGS)4- | DIELTQPPSVSVAPGQTARISCSGDSLRNKVYWYQQKPGQAPVLVIYKNNRPSGIPERFSGSNSGNTATLTISGTQA |
| | VH scFv | EDEADYYCQSYDGQKSLVFGGGTKLTVLGGGGSGGGGSGGGGSGGGGSQVQLVESGGGLVQPGGSLRLSCAAS |
| | | GFTFSDYVINWVRQAPGKGLEWVSGISWSGVNTHYADSVKGRFTISRDNSKNTLYLQMNSLRAEDTAVYYCARL |
| | | GATANNIRYKFMDVWGQGTLVTVSS |
| SEQ ID NO: 153 | DNA VH- | Caggttcaattggttgaaagcggtggtggtctggttcagcctggtggtagcctgcgtctgagctgtgcagcaagcggttttacctttagcgattat |
| | (GGGGS)3-VL | gtgattaattgggttcgtcaggcaccgggtaaaggtctggaatgggttagcggtattagctggtcaggtgttaatacccattatgcagatagcgtg |
| | scFv | aaaggtcgttttaccattagccgtgataatagcaaaaataccctgtatctgcagatgaatagcctgcgtgcagaagataccgcagtttattattgt |
| | | gcacgtctgggtgcaaccgcaaataatattcgctataaatttatggatgtgtggggtcagggtacactagttaccgttagcagtggtggtggtggt |
| | | agcggtggtggcggatctggtggcggtggcagtgatatcgaactgacccagcctccgagcgttagcgttgcaccgggtcagaccgcacgtatta |
| | | gctgtagcggtgatagtctgcgtaataaagtttattggtatcagcagaaaccgggtcaggctccggttctggttatttataaaaataatcgtccga |
| | | gcggtattccggaacgttttagcggtagcaatagcggtaataccgcaaccctgaccattagcggcacccaggcagaagatgaagccgattatta |
| | | ttgtcagagctatgatggtcagaaaagcctggtttttggtggtggcaccaagcttaccgttctg |
| SEQ ID NO: 154 | VH-(GGGGS)3- | QVQLVESGGGLVQPGGSLRLSCAASGFTFSDYVINWVRQAPGKGLEWVSGISWSGVNTHYADSVKGRFTISRDN |
| | VL scFv | SKNTLYLQMNSLRAEDTAVYYCARLGATANNIRYKFMDVWGQGTLVTVSSGGGGSGGGGSGGGGSDIELTQPPS |
| | | VSVAPGQTARISCSGDSLRNKVYWYQQKPGQAPVLVIYKNNRPSGIPERFSGSNSGNTATLTISGTQAEDEADYYC |
| | | QSYDGQKSLVFGGGTKLTVL |
| SEQ ID NO: 155 | DNA VH- | Caggttcaattggttgaaagcggtggtggtctggttcagcctggtggtagcctgcgtctgagctgtgcagcaagcggttttacctttagcgattat |
| | (GGGGS)4-VL | gtgattaattgggttcgtcaggcaccgggtaaaggtctggaatgggttagcggtattagctggtcaggtgttaatacccattatgcagatagcgtg |
| | scFv | aaaggtcgttttaccattagccgtgataatagcaaaaataccctgtatctgcagatgaatagcctgcgtgcagaagataccgcagtttattattgt |
| | | gcacgtctgggtgcaaccgcaaataatattcgctataaatttatggatgtgtggggtcagggtacactagttaccgttagcagtggtggtggtggt |
| | | agcggtggtggcggatctggtggcggtggttcaggtggtggtggcagtgatatcgaactgacccagcctccgagcgttagcgttgcaccgggtc |
| | | agaccgcacgtattagctgtagcggtgatagtctgcgtaataaagtttattggtatcagcagaaaccgggtcaggctccggttctggttatttata |
| | | aaaataatcgtccgagcggtattccggaacgttttagcggtagcaatagcggtaataccgcaaccctgaccattagcggcacccaggcagaag |
| | | atgaagccgattattattgtcagagctatgatggtcagaaaagcctggtttttggtggtggcaccaagcttaccgttctg |
| SEQ ID NO: 156 | VH-(GGGGS)4- | QVQLVESGGGLVQPGGSLRLSCAASGFTFSDYVINWVRQAPGKGLEWVSGISWSGVNTHYADSVKGRFTISRDN |
| | VL scFv | SKNTLYLQMNSLRAEDTAVYYCARLGATANNIRYKFMDVWGQGTLVTVSSGGGGSGGGGSGGGGSGGGGSDIE |
| | | LTQPPSVSVAPGQTARISCSGDSLRNKVYWYQQKPGQAPVLVIYKNNRPSGIPERFSGSNSGNTATLTTISGTQAED |
| | | EADYYCQSYDGQKSLVFGGGTKLTVL |
| MOR08545 | | |
| SEQ ID NO: 157 | DNA VL- | Gatatcgaactgacccagcctccgagcgttagcgttgcaccgggtcagaccgcacgtattagctgtagcggtgataatattggcagcaaatatg |
| | (GGGGS)3-VH | tgcattggtatcagcagaaaccgggtcaggcaccggttctggttatttatggtgatagcaatcgtccgagcggtattccggaacgttttagcggta |
| | scFv | gcaatagcggtaataccgcaaccctgaccattagcggcacccaggcagaagatgaagcagattattattgtacccgtaccagcaccccgattag |
| | | cggtgtttttggtggtggcaccaagcttaccgttctgggtggtggtggtagcggtggtggtggctcaggtggtggtggttcacaggttcaattggtt |
| | | gaaagtggtggtggtctggttcagcctggtggtagcctgcgtctgagctgtgcagcaagcggttttacctttagcgttaatggtatgcattgggttc |
| | | gccaggcaccgggtaaaggtctggaatgggttagcgttattgatggtatgggccatacctattatgccgatagcgttaaaggtcgttttaccatta |
| | | gccgtgataatagcaaaaataccctgtatctgcagatgaatagcctgcgtgcagaagataccgcagtttattattgcgcacgctatgattatatta |
| | | aatatggtgcctttgatccgtggggtcagggtacactagttaccgttagcagc |
| SEQ ID NO: 158 | VL-(GGGGS)3- | DIELTQPPSVSVAPGQTARISCSGDNIGSKYVHWYQQKPGQAPVLVIYGDSNRPSGIPERFSGSNSGNTATLTISGT |
| | VH scFv | QAEDEADYYCTRTSTPISGVFGGGTKLTVLGGGGSGGGGSGGGGSQVQLVESGGGLVQPGGSLRLSCAASGFTFS |
| | | VNGMHWVRQAPGKGLEWVSVIDGMGHTYYADSVKGRFTISRDNSKNTLYLQMNSLRAEDTAVYYCARYDYIKY |
| | | GAFDPWGQGTLVTVSS |
| SEQ ID NO: 159 | DNA VL- | Gatatcgaactgacccagcctccgagcgttagcgttgcaccgggtcagaccgcacgtattagctgtagcggtgataatattggcagcaaatatg |
| | (GGGGS)4-VH | tgcattggtatcagcagaaaccgggtcaggcaccggttctggttatttatggtgatagcaatcgtccgagcggtattccggaacgttttagcggta |
| | scFv | gcaatagcggtaataccgcaaccctgaccattagcggcacccaggcagaagatgaagcagattattattgtacccgtaccagcaccccgattag |
| | | cggtgtttttggtggtggcaccaagcttaccgttctgggtggtggtggtagcggtggtggtggctcaggtggtggcggttctggtggcggtggttca |
| | | caggttcaattggttgaaagtggtggtggtctggttcagcctggtggtagcctgcgtctgagctgtgcagcaagcggttttacctttagcgttaatg |
| | | gtatgcattgggttcgccaggcaccgggtaaaggtctggaatgggttagcgttattgatggtatgggccatacctattatgccgatagcgttaaa |
| | | ggtcgttttaccattagccgtgataatagcaaaaataccctgtatctgcagatgaatagcctgcgtgcagaagataccgcagtttattattgcgca |
| | | cgctatgattatattaaatatggtgcctttgatccgtggggtcagggtacactagttaccgttagcagc |
| SEQ ID NO: 160 | VL-(GGGGS)4- | DIELTQPPSVSVAPGQTARISCSGDNIGSKYVHWYQQKPGQAPVLVIYGDSNRPSGIPERFSGSNSGNTATLTISGT |
| | VH scFv | QAEDEADYYCTRTSTPISGVFGGGTKLTVLGGGGSGGGGSGGGGSGGGGSQVQLVESGGGLVQPGGSLRLSCAA |
| | | SGFTFSVNGMHWVRQAPGKGLEWVSVIDGMGHTYYADSVKGRFTISRDNSKNTLYLQMNSLRAEDTAVYYCAR |
| | | YDYIKYGAFDPWGQGTLVTVSS |
| SEQ ID NO: 161 | DNA VH- | Caggttcaattggttgaaagcggtggtggtctggttcagcctggtggtagcctgcgtctgagctgtgcagcaagcggttttacctttagcgttaat |
| | (GGGGS)3-VL | ggtatgcattgggttcgtcaggcaccgggtaaaggtctggaatgggttagcgttattgatggtatgggccatacctattatgccgatagcgttaaa |
| | scFv | ggtcgttttaccattagccgtgataatagcaaaaataccctgtatctgcagatgaatagcctgcgtgcagaagataccgcagtttattattgtgcc |
| | | cgttatgattatattaaatatggtgcctttgatccgtggggtcagggtacactagttaccgttagcagtggtggtggtggtagcggtggtggcgga |
| | | tctggtggcggtggttcagatatcgaactgacccagcctccgagcgttagcgttgcaccgggtcagaccgcacgtattagctgtagcggtgataa |
| | | tattggcagcaaatatgtgcattggtatcagcagaaaccgggtcaggctccggttctggttatttatggtgatagcaatcgtccgagcggtattcc |
| | | ggaacgttttagcggtagcaatagcggtaataccgcaaccctgaccattagcggcacccaggcagaagatgaagccgattattattgcacccgt |
| | | accagcaccccgattagcggtgtttttggtggtggcaccaagcttaccgttctg |
| SEQ ID NO: 162 | VH-(GGGGS)3- | QVQLVESGGGLVQPGGSLRLSCAASGFTFSVNGMHWVRQAPGKGLEWVSVIDGMGHTYYADSVKGRFTISRDN |
| | VL scFv | SKNTLYLQMNSLRAEDTAVYYCARYDYIKYGAFDPWGQGTLVTVSSGGGGSGGGGSGGGGSDIELTQPPSVSVA |
| | | PGQTARISCSGDNIGSKYVHWYQQKPGQAPVLVIYGDSNRPSGIPERFSGSNSGNTATLTISGTQAEDEADYYCTR |
| | | TSTPISGVFGGGTKLTVL |
| SEQ ID NO: 163 | DNA VH- | Caggttcaattggttgaaagcggtggtggtctggttcagcctggtggtagcctgcgtctgagctgtgcagcaagcggttttacctttagcgttaat |
| | (GGGGS)4-VL | ggtatgcattgggttcgtcaggcaccgggtaaaggtctggaatgggttagcgttattgatggtatgggccatacctattatgccgatagcgttaaa |
| | scFv | ggtcgttttaccattagccgtgataatagcaaaaataccctgtatctgcagatgaatagcctgcgtgcagaagataccgcagtttattattgtgcc |
| | | cgttatgattatattaaatatggtgcctttgatccgtggggtcagggtacactagttaccgttagcagtggtggtggtggtagcggtggtggcgga |
| | | tctggtggcggtggttcaggtggtggtggcagtgatatcgaactgacccagcctccgagcgttagcgttgcaccgggtcagaccgcacgtattag |
| | | ctgtagcggtgataatattggcagcaaatatgtgcattggtatcagcagaaaccgggtcaggctccggttctggttatttatggtgatagcaatcg |
| | | tccgagcggtattccggaacgttttagcggtagcaatagcggtaataccgcaaccctgaccattagcggcacccaggcagaagatgaagccga |
| | | ttattattgcacccgtaccagcaccccgattagcggtgtttttggtggtggcaccaagcttaccgttctg |
| SEQ ID NO: 164 | VH-(GGGGS)-4- | QVQLVESGGGLVQPGGSLRLSCAASGFTFSVNGMHWVRQAPGKGLEWVSVIDGMGHTYYADSVKGRFTISRDN |
| | VL scFv | SKNTLYLQMNSLRAEDTAVYYCARYDYIKYGAFDPWGQGTLVTVSSGGGGSGGGGSGGGGSGGGGSDIELTQPP |
| | | SVSVAPGQTARISCSGDNIGSKYVHWYQQKPGQAPVLVIYGDSNRPSGIPERFSGSNSGNTATLTISGTQAEDEAD |
| | | YYCTRTSTPISGVFGGGTKLTVL |
| Biparatopic | | |
| MOR08168/ | | |
| MOR06475 | | |
| SEQ ID NO: 165 | DNA Heavy | caggtgcaattggtcgagtctggcggaggactggtgcagcctggtggcagcctgagactgagctgcgccgccagcggcttcaccttcagcgact |
| | MOR08168 | acgtgatcaactgggtgcgacaggcccctggaaagggcctggaatgggtgtccggcatctcttggtctggcgtgaacacccactacgccgacag |
| | hIgG1 LALA | cgtgaagggccggttcaccatcagccgggacaacagcaagaacaccctgtacctgcagatgaacagcctgagagccgaggacaccgccgtgt |
| | MOR06475 | actactgtgccagactgggcgccaccgccaacaacatccggtacaagttcatggacgtgtggggccagggcacactggtgaccgtcagctcag |
| | scFv | ctagcaccaagggccccagcgtgttccccctggcccccagcagcaagagcaccagcggcggcacagccgccctgggctgcctggtgaaggact |
| | | acttccccgagcccgtgaccgtgtcctggaacagcggagccctgacctccggcgtgcacaccttccccgccgtgctgcagagcagcggcctgtac |
| | | agcctgtccagcgtggtgacagtgcccagcagcagcctgggcacccagacctacatctgcaacgtgaaccacaagcccagcaacaccaaggtg |
| | | gacaagagagtggagcccaagagctgcgacaagacccacacctgccccccctgcccagccccagaggcagcgggcggaccctccgtgttcct |
| | | gttcccccccaagcccaaggacaccctgatgatcagcaggacccccgaggtgacctgcgtggtggtggacgtgagccacgaggacccagaggt |
| | | gaagttcaactggtacgtggacggcgtggaggtgcacaacgccaagaccaagcccagagaggagcagtacaacagcacctacagggtggtgt |
| | | ccgtgctgaccgtgctgcaccaggactggctgaacggcaaggaatacaagtgcaaggtctccaacaaggccctgccagcccccatcgaaaaga |
| | | ccatcagcaaggccaagggccagccacgggagccccaggtgtacaccctgcccccctcccgggaggagatgaccaagaaccaggtgtccctg |
| | | acctgtctggtgaagggcttctaccccagcgacatcgccgtggagtgggagagcaacggccagcccgagaacaactacaagaccaccccccca |
| | | gtgctggacagcgacggcagcttcttcctgtacagcaagctgaccgtggacaagtccaggtggcagcagggcaacgtgttcagctgcagcgtga |
| | | tgcacgaagcgctgcacaaccactacacccagaagagcctgagcctgtcccccggcaagggcggctccggcggaagcgatatcgtgctgacac |
| | | agagccctgccaccctgtctctgagccctggcgagagagccaccctgagctgccgggccagccagttcatcggctcccgctacctggcctggtat |
| | | cagcagaagcccggacaggctcccagactgctgatctacggcgccagcaacagagctaccggcgtgcccgccagattttctggcagcggcagc |
| | | ggcaccgacttcaccctgaccatcagcagcctggaacccgaggacttcgccacctactactgccagcagtactacgactacccccagaccttcg |
| | | gccagggcaccaaggtggagatcaagggcggaggcggatccgggggtggcggaagtggaggcggaggaagcggagggggcggaagccag |
| | | gtgcaattgaaagagtccggccctgccctggtgaagcctacccagaccctgaccctgacatgcaccttcagcggcttcagcctgagcaacagag |
| | | gcggcggagtgggctggatcagacagcctcccggcaaggccctggaatggctggcctggatcgactgggacgacgacaagagctacagcacc |
| | | agcctgaaaacccggctgaccatctccaaggacaccagcaagaaccaggtggtgctcaccatgaccaacatggaccccgtggacaccgccac |
| | | ctattattgcgcccggatgcatctgcccctggtgttcgatagctggggccagggaaccctggtgacagtgtccagc |
| SEQ ID NO: 166 | Heavy | QVQLVESGGGLVQPGGSLRLSCAASGFTFSDYVINWVRQAPGKGLEWVSGISWSGVNTHYADSVKGRFTISRDN |
| | MOR08168 | SKNTLYLQMNSLRAEDTAVYYCARLGATANNIRYKFMDVWGQGTLVTVSSASTKGPSVFPLAPSSKSTSGGTAAL |
| | hIgG1 LALA | GCLVKDYFPEPVTVSWNSGALTSGVHTFPAVLQSSGLYSLSSVVTVPSSSLGTQTYICNVNHKPSNTKVDKRVEPKS |
| | MOR06475 | CDKTHTCPPCPAPEAAGGPSVFLFPPKPKDTLMISRTPEVTCVVVDVSHEDPEVKFNWYVDGVEVHNAKTKPREE |
| | scFv | QYNSTYRVVSVLTVLHQDWLNGKEYKCKVSNKALPAPIEKTISKAKGQPREPQVYTLPPSREEMTKNQVSLTCLVK |
| | | GFYPSDIAVEWESNGQPENNYKTTPPVLDSDGSFFLYSKLTVDKSRWQQGNVFSCSVMHEALHNHYTQKSLSLSP |
| | | GKGGSGGSDIVLTQSPATLSLSPGERATLSCRASQFIGSRYLAWYQQKPGQAPRLLIYGASNRATGVPARFSGSGSG |
| | | TDFTLTISSLEPEDFATYYCQQYYDYPQTFGQGTKVEIKGGGGSGGGGSGGGGSGGGGSQVQLKESGPALVKPTQ |
| | | TLTLTCTFSGFSLSNRGGGVGWIRQPPGKALEWLAWIDWDDDKSYSTSLKTRLTISKDTSKNQVVLTMTNMDPV |
| | | DTATYYCARMHLPLVFDSWGQGTLVTVSS |
| SEQ ID NO: 167 | VL MOR08168 | DIELTQPPSVSVAPGQTARISCSGDSLRNKVYWYQQKPGQAPVLVIYKNNRPSGIPERFSGSNSGNTATLTISGTQA |
| | | EDEADYYCQSYDGQKSLVFGGGTKLTVL |
| SEQ ID NO: 168 | DNA VL | GACATCGAGCTGACCCAGCCCCCTTCTGTGTCTGTGGCCCCTGGCCAGACCGCCAGAATCAGCTGCAGCGGC |
| | MOR08168 | GACAGCCTGCGGAACAAGGTGTACTGGTATCAGCAGAAGCCCGGCCAGGCTCCCGTGCTGGTGATCTACAAG |
| | | AACAACCGGCCCAGCGGCATCCCTGAGCGGTTCAGCGGCAGCAACAGCGGCAATACCGCCACCCTGACCATC |
| | | AGCGGCACCCAGGCCGAAGATGAGGCCGACTACTACTGCCAGAGCTACGACGGCCAGAAAAGCCTGGTGTT |
| | | CGGCGGAGGCACCAAGCTTACCGTGCTG |
| SEQ ID NO: 169 | DNA Light | Gacatcgagctgacccagcccccttctgtgtctgtggcccctggccagaccgccagaatcagctgcagcggcgacagcctgcggaacaaggtg |
| | lambda | tactggtatcagcagaagcccggccaggctcccgtgctggtgatctacaagaacaaccggcccagcggcatccctgagcggttcagcggcagc |
| | MOR08168 | aacagcggcaataccgccaccctgaccatcagcggcacccaggccgaagatgaggccgactactactgccagagctacgacggccagaaaag |
| | | cctggtgttcggcggaggcaccaagcttaccgtgctgggccagcccaaagccgcccctagcgtgaccctgttcccccccagcagcgaggaactg |
| | | caggccaacaaggccaccctggtctgcctgatcagcgacttctaccctggcgccgtgaccgtggcctggaaggccgacagcagccccgtgaag |
| | | gccggcgtggagacaaccacccccagcaagcagagcaacaacaagtacgccgccagcagctacctgagcctgacccccgagcagtggaaga |
| | | gccacagaagctacagctgccaggtcacccacgagggcagcaccgtggagaaaaccgtggcccccaccgagtgcagc |
| SEQ ID NO: 170 | Light lambda | DIELTQPPSVSVAPGQTARISCSGDSLRNKVYWYQQKPGQAPVLVIYKNNRPSGIPERFSGSNSGNTATLTISGTQA |
| | MOR08168 | EDEADYYCQSYDGQKSLVFGGGTKLTVLGQPKAAPSVTLFPPSSEELQANKATLVCLISDFYPGAVTVAWKADSSP |
| | | VKAGVETTTPSKQSNNKYAASSYLSLTPEQWKSHRSYSCQVTHEGSTVEKTVAPTECS |
| SEQ ID NO: 171 | Heavy | QVQLVESGGGLVQPGGSLRLSCAASGFTFSDYVINWVRQAPGKGLEWVSGISWSGVNTHYADSVKGRFTISRDN |
| | MOR08168 | SKNTLYLQMNSLRAEDTAVYYCARLGATANNIRYKFMDVWGQGTLVTVSSASTKGPSVFPLAPSSKSTSGGTAAL |
| | hIgG1 LALA | GCLVKDYFPEPVTVSWNSGALTSGVHTFPAVLQSSGLYSLSSVVTVPSSSLGTQTYICNVNHKPSNTKVDKRVEPKS |
| | (w/o K) | CDKTHTCPPCPAPEAAGGPSVFLFPPKPKDTLMISRTPEVTCVVVDVSHEDPEVKFNWYVDGVEVHNAKTKPREE |
| | MOR06475 | QYNSTYRVVSVLTVLHQDWLNGKEYKCKVSNKALPAPIEKTISKAKGQPREPQVYTLPPSREEMTKNQVSLTCLVK |
| | scFv | GFYPSDIAVEWESNGQPENNYKTTPPVLDSDGSFFLYSKLTVDKSRWQQGNVFSCSVMHEALHNHYTQKSLSLSP |
| | | GGGSGGSDIVLTQSPATLSLSPGERATLSCRASQFIGSRYLAWYQQKPGQAPRLLIYGASNRATGVPARFSGSGSGT |
| | | DFTLTISSLEPEDFATYYCQQYYDYPQTFGQGTKVEIKGGGGSGGGGSGGGGSGGGGSQVQLKESGPALVKPTQT |
| | | LTLTCTFSGFSLSNRGGGVGWIRQPPGKALEWLAWIDWDDDKSYSTSLKTRLTISKDTSKNQVVLTMTNMDPVD |
| | | TATYYCARMHLPLVFDSWGQGTLVTVSS |
| SEQ ID NO: 172 | DNA Heavy | CAGGTGCAATTGGTCGAGTCTGGCGGAGGACTGGTGCAGCCTGGTGGCAGCCTGAGACTGAGCTGCGCCGC |
| | MOR08168 | CAGCGGCTTCACCTTCAGCGACTACGTGATCAACTGGGTGCGACAGGCCCCTGGAAAGGGCCTGGAATGGGT |
| | hIgG1 LALA | GTCCGGCATCTCTTGGTCTGGCGTGAACACCCACTACGCCGACAGCGTGAAGGGCCGGTTCACCATCAGCCG |
| | (w/o K) | GGACAACAGCAAGAACACCCTGTACCTGCAGATGAACAGCCTGAGAGCCGAGGACACCGCCGTGTACTACTG |
| | MOR06475 | TGCCAGACTGGGCGCCACCGCCAACAACATCCGGTACAAGTTCATGGACGTGTGGGGCCAGGGCACACTGGT |
| | scFv | GACCGTCAGCTCAGCTAGCACCAAGGGCCCCAGCGTGTTCCCCCTGGCCCCCAGCAGCAAGAGCACCAGCGG |
| | | CGGCACAGCCGCCCTGGGCTGCCTGGTGAAGGACTACTTCCCCGAGCCCGTGACCGTGTCCTGGAACAGCGG |
| | | AGCCCTGACCTCCGGCGTGCACACCTTCCCCGCCGTGCTGCAGAGCAGCGGCCTGTACAGCCTGTCCAGCGTG |
| | | GTGACAGTGCCCAGCAGCAGCCTGGGCACCCAGACCTACATCTGCAACGTGAACCACAAGCCCAGCAACACC |
| | | AAGGTGGACAAGAGAGTGGAGCCCAAGAGCTGCGACAAGACCCACACCTGCCCCCCCTGCCCAGCCCCAGA |
| | | GGCAGCGGGCGGACCCTCCGTGTTCCTGTTCCCCCCCAAGCCCAAGGACACCCTGATGATCAGCAGGACCCCC |
| | | GAGGTGACCTGCGTGGTGGTGGACGTGAGCCACGAGGACCCAGAGGTGAAGTTCAACTGGTACGTGGACGG |
| | | CGTGGAGGTGCACAACGCCAAGACCAAGCCCAGAGAGGAGCAGTACAACAGCACCTACAGGGTGGTGTCCG |
| | | TGCTGACCGTGCTGCACCAGGACTGGCTGAACGGCAAGGAATACAAGTGCAAGGTCTCCAACAAGGCCCTGC |
| | | CAGCCCCCATCGAAAAGACCATCAGCAAGGCCAAGGGCCAGCCACGGGAGCCCCAGGTGTACACCCTGCCCC |
| | | CCTCCCGGGAGGAGATGACCAAGAACCAGGTGTCCCTGACCTGTCTGGTGAAGGGCTTCTACCCCAGCGACA |
| | | TCGCCGTGGAGTGGGAGAGCAACGGCCAGCCCGAGAACAACTACAAGACCACCCCCCCAGTGCTGGACAGC |
| | | GACGGCAGCTTCTTCCTGTACAGCAAGCTGACCGTGGACAAGTCCAGGTGGCAGCAGGGCAACGTGTTCAGC |
| | | TGCAGCGTGATGCACGAAGCGCTGCACAACCACTACACCCAGAAGAGCCTGAGCCTGTCCCCCGGCGGCGGC |
| | | TCCGGCGGAAGCGATATCGTGCTGACACAGAGCCCTGCCACCCTGTCTCTGAGCCCTGGCGAGAGAGCCACC |
| | | CTGAGCTGCCGGGCCAGCCAGTTCATCGGCTCCCGCTACCTGGCCTGGTATCAGCAGAAGCCCGGACAGGCT |
| | | CCCAGACTGCTGATCTACGGCGCCAGCAACAGAGCTACCGGCGTGCCCGCCAGATTTTCTGGCAGCGGCAGC |
| | | GGCACCGACTTCACCCTGACCATCAGCAGCCTGGAACCCGAGGACTTCGCCACCTACTACTGCCAGCAGTACT |
| | | ACGACTACCCCCAGACCTTCGGCCAGGGCACCAAGGTGGAGATCAAGGGCGGAGGCGGATCCGGGGGTGG |
| | | CGGAAGTGGAGGCGGAGGAAGCGGAGGGGGCGGAAGCCAGGTGCAATTGAAAGAGTCCGGCCCTGCCCTG |
| | | GTGAAGCCTACCCAGACCCTGACCCTGACATGCACCTTCAGCGGCTTCAGCCTGAGCAACAGAGGCGGCGGA |
| | | GTGGGCTGGATCAGACAGCCTCCCGGCAAGGCCCTGGAATGGCTGGCCTGGATCGACTGGGACGACGACAA |
| | | GAGCTACAGCACCAGCCTGAAAACCCGGCTGACCATCTCCAAGGACACCAGCAAGAACCAGGTGGTGCTCAC |
| | | CATGACCAACATGGACCCCGTGGACACCGCCACCTATTATTGCGCCCGGATGCATCTGCCCCTGGTGTTCGAT |
| | | AGCTGGGGCCAGGGAACCCTGGTGACAGTGTCCAGC |
| SEQ ID NO: 173 | Heavy | QVQLVESGGGLVQPGGSLRLSCAASGFTFSDYVINWVRQAPGKGLEWVSGISWSGVNTHYADSVKGRFTISRDN |
| | MOR08168 | SKNTLYLQMNSLRAEDTAVYYCARLGATANNIRYKFMDVWGQGTLVTVSSASTKGPSVFPLAPSSKSTSGGTAAL |
| | hIgG1 LALA | GCLVKDYFPEPVTVSWNSGALTSGVHTFPAVLQSSGLYSLSSVVTVPSSSLGTQTYICNVNHKPSNTKVDKRVEPKS |
| | MOR06475 | CDKTHTCPPCPAPEAAGGPSVFLFPPKPKDTLMISRTPEVTCVVVDVSHEDPEVKFNWYVDGVEVHNAKTKPREE |
| | scFv (DP to DA) | QYNSTYRVVSVLTVLHQDWLNGKEYKCKVSNKALPAPIEKTISKAKGQPREPQVYTLPPSREEMTKNQVSLTCLVK |
| | | GFYPSDIAVEWESNGQPENNYKTTPPVLDSDGSFFLYSKLTVDKSRWQQGNVFSCSVMHEALHNHYTQKSLSLSP |
| | | GKGGSGGSDIVLTQSPATLSLSPGERATLSCRASQFIGSRYLAWYQQKPGQAPRLLIYGASNRATGVPARFSGSGSG |
| | | TDFTLTISSLEPEDFATYYCQQYYDYPQTFGQGTKVEIKGGGGSGGGGSGGGGSGGGGSQVQLKESGPALVKPTQ |
| | | TLTLTCTFSGFSLSNRGGGVGWIRQPPGKALEWLAWIDWDDDKSYSTSLKTRLTISKDTSKNQVVLTMTNMDAV |
| | | DTATYYCARMHLPLVFDSWGQGTLVTVSS |
| SEQ ID NO: 174 | DNA Heavy | CAGGTGCAATTGGTCGAGTCTGGCGGAGGACTGGTGCAGCCTGGTGGCAGCCTGAGACTGAGCTGCGCCGC |
| | MOR08168 | CAGCGGCTTCACCTTCAGCGACTACGTGATCAACTGGGTGCGACAGGCCCCTGGAAAGGGCCTGGAATGGGT |
| | hIgG1 LALA | GTCCGGCATCTCTTGGTCTGGCGTGAACACCCACTACGCCGACAGCGTGAAGGGCCGGTTCACCATCAGCCG |
| | MOR06475 | GGACAACAGCAAGAACACCCTGTACCTGCAGATGAACAGCCTGAGAGCCGAGGACACCGCCGTGTACTACTG |
| | scFv (DP to DA) | TGCCAGACTGGGCGCCACCGCCAACAACATCCGGTACAAGTTCATGGACGTGTGGGGCCAGGGCACACTGGT |
| | | GACCGTCAGCTCAGCTAGCACCAAGGGCCCCAGCGTGTTCCCCCTGGCCCCCAGCAGCAAGAGCACCAGCGG |
| | | CGGCACAGCCGCCCTGGGCTGCCTGGTGAAGGACTACTTCCCCGAGCCCGTGACCGTGTCCTGGAACAGCGG |
| | | AGCCCTGACCTCCGGCGTGCACACCTTCCCCGCCGTGCTGCAGAGCAGCGGCCTGTACAGCCTGTCCAGCGTG |
| | | GTGACAGTGCCCAGCAGCAGCCTGGGCACCCAGACCTACATCTGCAACGTGAACCACAAGCCCAGCAACACC |
| | | AAGGTGGACAAGAGAGTGGAGCCCAAGAGCTGCGACAAGACCCACACCTGCCCCCCCTGCCCAGCCCCAGA |
| | | GGCAGCGGGCGGACCCTCCGTGTTCCTGTTCCCCCCCAAGCCCAAGGACACCCTGATGATCAGCAGGACCCCC |
| | | GAGGTGACCTGCGTGGTGGTGGACGTGAGCCACGAGGACCCAGAGGTGAAGTTCAACTGGTACGTGGACGG |
| | | CGTGGAGGTGCACAACGCCAAGACCAAGCCCAGAGAGGAGCAGTACAACAGCACCTACAGGGTGGTGTCCG |
| | | TGCTGACCGTGCTGCACCAGGACTGGCTGAACGGCAAGGAATACAAGTGCAAGGTCTCCAACAAGGCCCTGC |
| | | CAGCCCCCATCGAAAAGACCATCAGCAAGGCCAAGGGCCAGCCACGGGAGCCCCAGGTGTACACCCTGCCCC |
| | | CCTCCCGGGAGGAGATGACCAAGAACCAGGTGTCCCTGACCTGTCTGGTGAAGGGCTTCTACCCCAGCGACA |
| | | TCGCCGTGGAGTGGGAGAGCAACGGCCAGCCCGAGAACAACTACAAGACCACCCCCCCAGTGCTGGACAGC |
| | | GACGGCAGCTTCTTCCTGTACAGCAAGCTGACCGTGGACAAGTCCAGGTGGCAGCAGGGCAACGTGTTCAGC |
| | | TGCAGCGTGATGCACGAAGCGCTGCACAACCACTACACCCAGAAGAGCCTGAGCCTGTCCCCCGGCAAGGGC |
| | | GGCTCCGGCGGAAGCGATATCGTGCTGACACAGAGCCCTGCCACCCTGTCTCTGAGCCCTGGCGAGAGAGCC |
| | | ACCCTGAGCTGCCGGGCCAGCCAGTTCATCGGCTCCCGCTACCTGGCCTGGTATCAGCAGAAGCCCGGACAG |
| | | GCTCCCAGACTGCTGATCTACGGCGCCAGCAACAGAGCTACCGGCGTGCCCGCCAGATTTTCTGGCAGCGGC |
| | | AGCGGCACCGACTTCACCCTGACCATCAGCAGCCTGGAACCCGAGGACTTCGCCACCTACTACTGCCAGCAGT |
| | | ACTACGACTACCCCCAGACCTTCGGCCAGGGCACCAAGGTGGAGATCAAGGGCGGAGGCGGATCCGGGGGT |
| | | GGCGGAAGTGGAGGCGGAGGAAGCGGAGGGGGCGGAAGCCAGGTGCAATTGAAAGAGTCCGGCCCTGCC |
| | | CTGGTGAAGCCTACCCAGACCCTGACCCTGACATGCACCTTCAGCGGCTTCAGCCTGAGCAACAGAGGCGGC |
| | | GGAGTGGGCTGGATCAGACAGCCTCCCGGCAAGGCCCTGGAATGGCTGGCCTGGATCGACTGGGACGACGA |
| | | CAAGAGCTACAGCACCAGCCTGAAAACCCGGCTGACCATCTCCAAGGACACCAGCAAGAACCAGGTGGTGCT |
| | | CACCATGACCAACATGGACGCCGTGGACACCGCCACCTATTATTGCGCCCGGATGCATCTGCCCCTGGTGTTC |
| | | GATAGCTGGGGCCAGGGAACCCTGGTGACAGTGTCCAGC |
| SEQ ID NO: 175 | Heavy | QVQLVESGGGLVQPGGSLRLSCAASGFTFSDYVINWVRQAPGKGLEWVSGISWSGVNTHYADSVKGRFTISRDN |
| | MOR08168 | SKNTLYLQMNSLRAEDTAVYYCARLGATANNIRYKFMDVWGQGTLVTVSSASTKGPSVFPLAPSSKSTSGGTAAL |
| | hIgG1 LALA | GCLVKDYFPEPVTVSWNSGALTSGVHTFPAVLQSSGLYSLSSVVTVPSSSLGTQTYICNVNHKPSNTKVDKRVEPKS |
| | MOR06475 | CDKTHTCPPCPAPEAAGGPSVFLFPPKPKDTLMISRTPEVTCVVVDVSHEDPEVKFNWYVDGVEVHNAKTKPREE |
| | scFv (DP to TA) | QYNSTYRVVSVLTVLHQDWLNGKEYKCKVSNKALPAPIEKTISKAKGQPREPQVYTLPPSREEMTKNQVSLTCLVK |
| | | GFYPSDIAVEWESNGQPENNYKTTPPVLDSDGSFFLYSKLTVDKSRWQQGNVFSCSVMHEALHNHYTQKSLSLSP |
| | | GKGGSGGSDIVLTQSPATLSLSPGERATLSCRASQFIGSRYLAWYQQKPGQAPRLLIYGASNRATGVPARFSGSGSG |
| | | TDFTLTISSLEPEDFATYYCQQYYDYPQTFGQGTKVEIKGGGGSGGGGSGGGGSGGGGSQVQLKESGPALVKPTQ |
| | | TLTLTCTFSGFSLSNRGGGVGWIRQPPGKALEWLAWIDWDDDKSYSTSLKTRLTISKDTSKNQVVLTMTNMTAVD |
| | | TATYYCARMHLPLVFDSWGQGTLVTVSS |
| SEQ ID NO: 176 | DNA Heavy | CAGGTGCAATTGGTCGAGTCTGGCGGAGGACTGGTGCAGCCTGGTGGCAGCCTGAGACTGAGCTGCGCCGC |
| | MOR08168 | CAGCGGCTTCACCTTCAGCGACTACGTGATCAACTGGGTGCGACAGGCCCCTGGAAAGGGCCTGGAATGGGT |
| | hIgG1 LALA | GTCCGGCATCTCTTGGTCTGGCGTGAACACCCACTACGCCGACAGCGTGAAGGGCCGGTTCACCATCAGCCG |
| | MOR06475 | GGACAACAGCAAGAACACCCTGTACCTGCAGATGAACAGCCTGAGAGCCGAGGACACCGCCGTGTACTACTG |
| | scFv (DP to TA) | TGCCAGACTGGGCGCCACCGCCAACAACATCCGGTACAAGTTCATGGACGTGTGGGGCCAGGGCACACTGGT |
| | | GACCGTCAGCTCAGCTAGCACCAAGGGCCCCAGCGTGTTCCCCCTGGCCCCCAGCAGCAAGAGCACCAGCGG |
| | | CGGCACAGCCGCCCTGGGCTGCCTGGTGAAGGACTACTTCCCCGAGCCCGTGACCGTGTCCTGGAACAGCGG |
| | | AGCCCTGACCTCCGGCGTGCACACCTTCCCCGCCGTGCTGCAGAGCAGCGGCCTGTACAGCCTGTCCAGCGTG |
| | | GTGACAGTGCCCAGCAGCAGCCTGGGCACCCAGACCTACATCTGCAACGTGAACCACAAGCCCAGCAACACC |
| | | AAGGTGGACAAGAGAGTGGAGCCCAAGAGCTGCGACAAGACCCACACCTGCCCCCCCTGCCCAGCCCCAGA |
| | | GGCAGCGGGCGGACCCTCCGTGTTCCTGTTCCCCCCCAAGCCCAAGGACACCCTGATGATCAGCAGGACCCCC |
| | | GAGGTGACCTGCGTGGTGGTGGACGTGAGCCACGAGGACCCAGAGGTGAAGTTCAACTGGTACGTGGACGG |
| | | CGTGGAGGTGCACAACGCCAAGACCAAGCCCAGAGAGGAGCAGTACAACAGCACCTACAGGGTGGTGTCCG |
| | | TGCTGACCGTGCTGCACCAGGACTGGCTGAACGGCAAGGAATACAAGTGCAAGGTCTCCAACAAGGCCCTGC |
| | | CAGCCCCCATCGAAAAGACCATCAGCAAGGCCAAGGGCCAGCCACGGGAGCCCCAGGTGTACACCCTGCCCC |
| | | CCTCCCGGGAGGAGATGACCAAGAACCAGGTGTCCCTGACCTGTCTGGTGAAGGGCTTCTACCCCAGCGACA |
| | | TCGCCGTGGAGTGGGAGAGCAACGGCCAGCCCGAGAACAACTACAAGACCACCCCCCCAGTGCTGGACAGC |
| | | GACGGCAGCTTCTTCCTGTACAGCAAGCTGACCGTGGACAAGTCCAGGTGGCAGCAGGGCAACGTGTTCAGC |
| | | TGCAGCGTGATGCACGAAGCGCTGCACAACCACTACACCCAGAAGAGCCTGAGCCTGTCCCCCGGCAAGGGC |
| | | GGCTCCGGCGGAAGCGATATCGTGCTGACACAGAGCCCTGCCACCCTGTCTCTGAGCCCTGGCGAGAGAGCC |
| | | ACCCTGAGCTGCCGGGCCAGCCAGTTCATCGGCTCCCGCTACCTGGCCTGGTATCAGCAGAAGCCCGGACAG |
| | | GCTCCCAGACTGCTGATCTACGGCGCCAGCAACAGAGCTACCGGCGTGCCCGCCAGATTTTCTGGCAGCGGC |
| | | AGCGGCACCGACTTCACCCTGACCATCAGCAGCCTGGAACCCGAGGACTTCGCCACCTACTACTGCCAGCAGT |
| | | ACTACGACTACCCCCAGACCTTCGGCCAGGGCACCAAGGTGGAGATCAAGGGCGGAGGCGGATCCGGGGGT |
| | | GGCGGAAGTGGAGGCGGAGGAAGCGGAGGGGGCGGAAGCCAGGTGCAATTGAAAGAGTCCGGCCCTGCC |
| | | CTGGTGAAGCCTACCCAGACCCTGACCCTGACATGCACCTTCAGCGGCTTCAGCCTGAGCAACAGAGGCGGC |
| | | GGAGTGGGCTGGATCAGACAGCCTCCCGGCAAGGCCCTGGAATGGCTGGCCTGGATCGACTGGGACGACGA |
| | | CAAGAGCTACAGCACCAGCCTGAAAACCCGGCTGACCATCTCCAAGGACACCAGCAAGAACCAGGTGGTGCT |
| | | CACCATGACCAACATGACCGCCGTGGACACCGCCACCTATTATTGCGCCCGGATGCATCTGCCCCTGGTGTTC |
| | | GATAGCTGGGGCCAGGGAACCCTGGTGACAGTGTCCAGC |
| SEQ ID NO: 177 | Light | DIVLTQSPATLSLSPGERATLSCRASQFIGSRYLAWYQQKPGQAPRLLIYGASNRATGVPARFSGSGSGTDFTLTISSL |
| | MOR06475 | EPEDFATYYCQQYYDYPQTFGQGTKVEIKGGGGSGGGGSGGGGSGGGGSQVQLKESGPALVKPTQTLTLTCTFS |
| | scFv | GFSLSNRGGGVGWIRQPPGKALEWLAWIDWDDDKSYSTSLKTRLTISKDTSKNQVVLTMTNMDPVDTATYYCAR |
| | MOR08168 | MHLPLVFDSWGQGTLVTVSSGGSGGSDIELTQPPSVSVAPGQTARISCSGDSLRNKVYWYQQKPGQAPVLVIYKN |
| | lambda | NRPSGIPERFSGSNSGNTATLTISGTQAEDEADYYCQSYDGQKSLVFGGGTKLTVLGQPKAAPSVTLFPPSSEELQA |
| | | NKATLVCLISDFYPGAVTVAWKADSSPVKAGVETTTPSKQSNNKYAASSYLSLTPEQWKSHRSYSCQVTHEGSTVE |
| | | KTVAPTECS |
| SEQ ID NO: 178 | DNA Light | GATATCGTGCTGACACAGAGCCCTGCCACCCTGTCTCTGAGCCCTGGCGAGAGAGCCACCCTGAGCTGCCGG |
| | MOR06475 | GCCAGCCAGTTCATCGGCTCCCGCTACCTGGCCTGGTATCAGCAGAAGCCCGGACAGGCTCCCAGACTGCTG |
| | scFv | ATCTACGGCGCCAGCAACAGAGCTACCGGCGTGCCCGCCAGATTTTCTGGCAGCGGCAGCGGCACCGACTTC |
| | MOR08168 | ACCCTGACCATCAGCAGCCTGGAACCCGAGGACTTCGCCACCTACTACTGCCAGCAGTACTACGACTACCCCC |
| | lambda | AGACCTTCGGCCAGGGCACCAAGGTGGAGATCAAGGGCGGAGGCGGATCCGGGGGTGGCGGAAGTGGAG |
| | | GCGGAGGAAGCGGAGGGGGCGGAAGCCAGGTGCAATTGAAAGAGTCCGGCCCTGCCCTGGTGAAGCCTAC |
| | | CCAGACCCTGACCCTGACATGCACCTTCAGCGGCTTCAGCCTGAGCAACAGAGGCGGCGGAGTGGGCTGGAT |
| | | CAGACAGCCTCCCGGCAAGGCCCTGGAATGGCTGGCCTGGATCGACTGGGACGACGACAAGAGCTACAGCA |
| | | CCAGCCTGAAAACCCGGCTGACCATCTCCAAGGACACCAGCAAGAACCAGGTGGTGCTCACCATGACCAACA |
| | | TGGACCCCGTGGACACCGCCACCTATTATTGCGCCCGGATGCATCTGCCCCTGGTGTTCGATAGCTGGGGCCA |
| | | GGGAACCCTGGTGACAGTGTCCAGCGGCGGCTCCGGCGGAAGCGACATCGAGCTGACCCAGCCCCCTTCTGT |
| | | GTCTGTGGCGCCCGGGCAGACCGCCAGAATCAGCTGCAGCGGCGACAGCCTGCGGAACAAGGTGTACTGGT |
| | | ATCAGCAGAAGCCCGGCCAGGCTCCCGTGCTGGTGATCTACAAGAACAACCGGCCCAGCGGCATCCCTGAGC |
| | | GGTTCAGCGGCAGCAACAGCGGCAATACCGCCACCCTGACCATCAGCGGCACCCAGGCCGAAGATGAGGCC |
| | | GACTACTACTGCCAGAGCTACGACGGCCAGAAAAGCCTGGTGTTCGGCGGAGGCACCAAGCTTACCGTGCTG |
| | | GGCCAGCCCAAAGCCGCCCCTAGCGTGACCCTGTTCCCCCCCAGCAGCGAGGAACTGCAGGCCAACAAGGCC |
| | | ACCCTGGTCTGCCTGATCAGCGACTTCTACCCTGGCGCCGTGACCGTGGCCTGGAAGGCCGACAGCAGCCCC |
| | | GTGAAGGCCGGCGTGGAGACAACCACCCCCAGCAAGCAGAGCAACAACAAGTACGCCGCCAGCAGCTACCT |
| | | GAGCCTGACCCCCGAGCAGTGGAAGAGCCACAGAAGCTACAGCTGCCAGGTCACCCACGAGGGCAGCACCG |
| | | TGGAGAAAACCGTGGCCCCCACCGAGTGCAGC |
| SEQ ID NO: 179 | VH MOR08168 | QVQLVESGGGLVQPGGSLRLSCAASGFTFSDYVINWVRQAPGKGLEWVSGISWSGVNTHYADSVKGRFTISRDN |
| | | SKNTLYLQMNSLRAEDTAVYYCARLGATANNIRYKFMDVWGQGTLVTVSS |
| SEQ ID NO: 180 | DNA VH | Caggtgcaattggtcgagtctggcggaggactggtgcagcctggtggcagcctgagactgagctgcgccgccagcggcttcaccttcagcgact |
| | MOR08168 | acgtgatcaactgggtgcgacaggcccctggaaagggcctggaatgggtgtccggcatctcttggtctggcgtgaacacccactacgccgacag |
| | | cgtgaagggccggttcaccatcagccgggacaacagcaagaacaccctgtacctgcagatgaacagcctgagagccgaggacaccgccgtgt |
| | | actactgtgccagactgggcgccaccgccaacaacatccggtacaagttcatggacgtgtggggccagggcacactggtgaccgtcagctca |
| SEQ ID NO: 181 | Heavy | QVQLVESGGGLVQPGGSLRLSCAASGFTFSDYVINWVRQAPGKGLEWVSGISWSGVNTHYADSVKGRFTISRDN |
| | MOR08168 | SKNTLYLQMNSLRAEDTAVYYCARLGATANNIRYKFMDVWGQGTLVTVSSASTKGPSVFPLAPSSKSTSGGTAAL |
| | hIgG1 LALA | GCLVKDYFPEPVTVSWNSGALTSGVHTFPAVLQSSGLYSLSSVVTVPSSSLGTQTYICNVNHKPSNTKVDKRVEPKS |
| | | CDKTHTCPPCPAPEAAGGPSVFLFPPKPKDTLMISRTPEVTCVVVDVSHEDPEVKFNWYVDGVEVHNAKTKPREE |
| | | QYNSTYRVVSVLTVLHQDWLNGKEYKCKVSNKALPAPIEKTISKAKGQPREPQVYTLPPSREEMTKNQVSLTCLVK |
| | | GFYPSDIAVEWESNGQPENNYKTTPPVLDSDGSFFLYSKLTVDKSRWQQGNVFSCSVMHEALHNHYTQKSLSLSP |
| | | GK |
| SEQ ID NO: 182 | DNA Heavy | CAGGTGCAATTGGTCGAGTCTGGCGGAGGACTGGTGCAGCCTGGTGGCAGCCTGAGACTGAGCTGCGCCGC |
| | MOR08168 | CAGCGGCTTCACCTTCAGCGACTACGTGATCAACTGGGTGCGACAGGCCCCTGGAAAGGGCCTGGAATGGGT |
| | hIgG1 LALA | GTCCGGCATCTCTTGGTCTGGCGTGAACACCCACTACGCCGACAGCGTGAAGGGCCGGTTCACCATCAGCCG |
| | | GGACAACAGCAAGAACACCCTGTACCTGCAGATGAACAGCCTGAGAGCCGAGGACACCGCCGTGTACTACTG |
| | | TGCCAGACTGGGCGCCACCGCCAACAACATCCGGTACAAGTTCATGGACGTGTGGGGCCAGGGCACACTGGT |
| | | GACCGTCAGCTCAGCTAGCACCAAGGGCCCCAGCGTGTTCCCCCTGGCCCCCAGCAGCAAGAGCACCAGCGG |
| | | CGGCACAGCCGCCCTGGGCTGCCTGGTGAAGGACTACTTCCCCGAGCCCGTGACCGTGTCCTGGAACAGCGG |
| | | AGCCCTGACCTCCGGCGTGCACACCTTCCCCGCCGTGCTGCAGAGCAGCGGCCTGTACAGCCTGTCCAGCGTG |
| | | GTGACAGTGCCCAGCAGCAGCCTGGGCACCCAGACCTACATCTGCAACGTGAACCACAAGCCCAGCAACACC |
| | | AAGGTGGACAAGAGAGTGGAGCCCAAGAGCTGCGACAAGACCCACACCTGCCCCCCCTGCCCAGCCCCAGA |
| | | GGCAGCGGGCGGACCCTCCGTGTTCCTGTTCCCCCCCAAGCCCAAGGACACCCTGATGATCAGCAGGACCCCC |
| | | GAGGTGACCTGCGTGGTGGTGGACGTGAGCCACGAGGACCCAGAGGTGAAGTTCAACTGGTACGTGGACGG |
| | | CGTGGAGGTGCACAACGCCAAGACCAAGCCCAGAGAGGAGCAGTACAACAGCACCTACAGGGTGGTGTCCG |
| | | TGCTGACCGTGCTGCACCAGGACTGGCTGAACGGCAAGGAATACAAGTGCAAGGTCTCCAACAAGGCCCTGC |
| | | CAGCCCCCATCGAAAAGACCATCAGCAAGGCCAAGGGCCAGCCACGGGAGCCCCAGGTGTACACCCTGCCCC |
| | | CCTCCCGGGAGGAGATGACCAAGAACCAGGTGTCCCTGACCTGTCTGGTGAAGGGCTTCTACCCCAGCGACA |
| | | TCGCCGTGGAGTGGGAGAGCAACGGCCAGCCCGAGAACAACTACAAGACCACCCCCCCAGTGCTGGACAGC |
| | | GACGGCAGCTTCTTCCTGTACAGCAAGCTGACCGTGGACAAGTCCAGGTGGCAGCAGGGCAACGTGTTCAGC |
| | | TGCAGCGTGATGCACGAGGCCCTGCACAACCACTACACCCAGAAGAGCCTGAGCCTGTCCCCCGGCAAG |
| SEQ ID NO: 183 | VL MOR06475 | DIVLTQSPATLSLSPGERATLSCRASQFIGSRYLAWYQQKPGQAPRLLIYGASNRATGVPARFSGSGSGTDFTLTISSL |
| | | EPEDFATYYCQQYYDYPQTFGQGTKVEIK |
| SEQ ID NO: 184 | DNA VL | Gatatcgtgctgacccagagcccggcgaccctgagcctgtctccgggcgaacgtgcgaccctgagctgcagagcgagccagtttattggttctc |
| | MOR06475 | gttatctggcttggtaccagcagaaaccaggtcaagcaccgcgtctattaatttatggtgcttctaatcgtgcaactggggtcccggcgcgttttag |
| | | cggctctggatccggcacggattttaccctgaccattagcagcctggaacctgaagactttgcgacttattattgccagcagtattatgattatcct |
| | | cagacctttggccagggtacgaaagttgaaattaaa |
| SEQ ID NO: 185 | Light | DIVLTQSPATLSLSPGERATLSCRASQFIGSRYLAWYQQKPGQAPRLLIYGASNRATGVPARFSGSGSGTDFTLTISSL |
| | MOR06475 | EPEDFATYYCQQYYDYPQTFGQGTKVEIKRTVAAPSVFIFPPSDEQLKSGTASVVCLLNNFYPREAKVQWKVDNAL |
| | kappa | QSGNSQESVTEQDSKDSTYSLSSTLTLSKADYEKHKVYACEVTHQGLSSPVTKSFNRGEC |
| SEQ ID NO: 186 | DNA Light | GATATCGTGCTGACCCAGAGCCCGGCGACCCTGAGCCTGTCTCCGGGCGAACGTGCGACCCTGAGCTGCAGA |
| | MOR06475 | GCGAGCCAGTTTATTGGTTCTCGTTATCTGGCTTGGTACCAGCAGAAACCAGGTCAAGCACCGCGTCTATTAA |
| | kappa | TTTATGGTGCTTCTAATCGTGCAACTGGGGTCCCGGCGCGTTTTAGCGGCTCTGGATCCGGCACGGATTTTAC |
| | | CCTGACCATTAGCAGCCTGGAACCTGAAGACTTTGCGACTTATTATTGCCAGCAGTATTATGATTATCCTCAGA |
| | | CCTTTGGCCAGGGTACGAAAGTTGAAATTAAACGTACGGTGGCCGCTCCCAGCGTGTTCATCTTCCCCCCCAG |
| | | CGACGAGCAGCTGAAGAGCGGCACCGCCAGCGTGGTGTGCCTGCTGAACAACTTCTACCCCCGGGAGGCCA |
| | | AGGTGCAGTGGAAGGTGGACAACGCCCTGCAGAGCGGCAACAGCCAGGAGAGCGTCACCGAGCAGGACAG |
| | | CAAGGACTCCACCTACAGCCTGAGCAGCACCCTGACCCTGAGCAAGGCCGACTACGAGAAGCATAAGGTGTA |
| | | CGCCTGCGAGGTGACCCACCAGGGCCTGTCCAGCCCCGTGACCAAGAGCTTCAACAGGGGCGAGTGC |
| SEQ ID NO: 187 | Heavy | QVQLKESGPALVKPTQTLTLTCTFSGFSLSNRGGGVGWIRQPPGKALEWLAWIDWDDDKSYSTSLKTRLTISKDTS |
| | MOR06475 | KNQVVLTMTNMDPVDTATYYCARMHLPLVFDSWGQGTLVTVSSASTKGPSVFPLAPSSKSTSGGTAALGCLVKD |
| | hIgG1LALA | YFPEPVTVSWNSGALTSGVHTFPAVLQSSGLYSLSSVVTVPSSSLGTQTYICNVNHKPSNTKVDKRVEPKSCDKTHT |
| | MOR08168 | CPPCPAPEAAGGPSVFLFPPKPKDTLMISRTPEVTCVVVDVSHEDPEVKFNWYVDGVEVHNAKTKPREEQYNSTY |
| | scFv (VH-3-VL) | RVVSVLTVLHQDWLNGKEYKCKVSNKALPAPIEKTISKAKGQPREPQVYTLPPSREEMTKNQVSLTCLVKGFYPSDI |
| | | AVEWESNGQPENNYKTTPPVLDSDGSFFLYSKLTVDKSRWQQGNVFSCSVMHEALHNHYTQKSLSLSPGKGGSG |
| | | GSQVQLVESGGGLVQPGGSLRLSCAASGFTFSDYVINWVRQAPGKGLEWVSGISWSGVNTHYADSVKGRFTISR |
| | | DNSKNTLYLQMNSLRAEDTAVYYCARLGATANNIRYKFMDVWGQGTLVTVSSGGGGSGGGGSGGGGSDIELTQ |
| | | PPSVSVAPGQTARISCSGDSLRNKVYWYQQKPGQAPVLVIYKNNRPSGIPERFSGSNSGNTATLTISGTQAEDEAD |
| | | YYCQSYDGQKSLVFGGGTKLTVL |
| SEQ ID NO: 188 | DNA Heavy | CAGGTGCAATTGAAAGAAAGCGGCCCGGCCCTGGTGAAACCGACCCAAACCCTGACCCTGACCTGTACCTTTT |
| | MOR06475 | CCGGATTTAGCCTGTCTAATCGTGGTGGTGGTGTGGGTTGGATTCGCCAGCCGCCTGGGAAAGCCCTCGAGT |
| | hIgG1LALA | GGCTGGCTTGGATCGATTGGGATGATGATAAGTCTTATAGCACCAGCCTGAAAACGCGTCTGACCATTAGCA |
| | MOR08168 | AAGATACTTCGAAAAATCAGGTGGTGCTGACTATGACCAACATGGACCCGGTGGATACGGCCACCTATTATTG |
| | scFv (VH-3-VL) | CGCGCGTATGCATCTTCCTCTTGTTTTTGATTCTTGGGGCCAAGGCACCCTGGTGACGGTTAGCTCAGCTAGCA |
| | | CCAAGGGCCCCAGCGTGTTCCCCCTGGCCCCCAGCAGCAAGAGCACCAGCGGCGGCACAGCCGCCCTGGGCT |
| | | GCCTGGTGAAGGACTACTTCCCCGAGCCCGTGACCGTGTCCTGGAACAGCGGAGCCCTGACCTCCGGCGTGC |
| | | ACACCTTCCCCGCCGTGCTGCAGAGCAGCGGCCTGTACAGCCTGTCCAGCGTGGTGACAGTGCCCAGCAGCA |
| | | GCCTGGGCACCCAGACCTACATCTGCAACGTGAACCACAAGCCCAGCAACACCAAGGTGGACAAGAGAGTG |
| | | GAGCCCAAGAGCTGCGACAAGACCCACACCTGCCCCCCCTGCCCAGCCCCAGAGGCAGCGGGCGGACCCTCC |
| | | GTGTTCCTGTTCCCCCCCAAGCCCAAGGACACCCTGATGATCAGCAGGACCCCCGAGGTGACCTGCGTGGTG |
| | | GTGGACGTGAGCCACGAGGACCCAGAGGTGAAGTTCAACTGGTACGTGGACGGCGTGGAGGTGCACAACGC |
| | | CAAGACCAAGCCCAGAGAGGAGCAGTACAACAGCACCTACAGGGTGGTGTCCGTGCTGACCGTGCTGCACCA |
| | | GGACTGGCTGAACGGCAAGGAATACAAGTGCAAGGTCTCCAACAAGGCCCTGCCAGCCCCCATCGAAAAGAC |
| | | CATCAGCAAGGCCAAGGGCCAGCCACGGGAGCCCCAGGTGTACACCCTGCCCCCCTCCCGGGAGGAGATGA |
| | | CCAAGAACCAGGTGTCCCTGACCTGTCTGGTGAAGGGCTTCTACCCCAGCGACATCGCCGTGGAGTGGGAGA |
| | | GCAACGGCCAGCCCGAGAACAACTACAAGACCACCCCCCCAGTGCTGGACAGCGACGGCAGCTTCTTCCTGT |
| | | ACAGCAAGCTGACCGTGGACAAGTCCAGGTGGCAGCAGGGCAACGTGTTCAGCTGCAGCGTGATGCACGAA |
| | | GCGCTGCACAACCACTACACCCAGAAGAGCCTGAGCCTGTCCCCCGGCAAGGGCGGCTCCGGCGGAAGCCA |
| | | GGTTCAATTGGTTGAAAGCGGTGGTGGTCTGGTTCAGCCTGGTGGTAGCCTGCGTCTGAGCTGTGCAGCAAG |
| | | CGGTTTTACCTTTAGCGATTATGTGATTAATTGGGTTCGTCAGGCACCGGGTAAAGGTCTGGAATGGGTTAGC |
| | | GGTATTAGCTGGTCAGGTGTTAATACCCATTATGCAGATAGCGTGAAAGGTCGTTTTACCATTAGCCGTGATA |
| | | ATAGCAAAAATACCCTGTATCTGCAGATGAATAGCCTGCGTGCAGAAGATACCGCAGTTTATTATTGTGCACG |
| | | TCTGGGTGCAACCGCAAATAATATTCGCTATAAATTTATGGATGTGTGGGGTCAGGGTACACTAGTTACCGTT |
| | | AGCAGTGGTGGTGGTGGTAGCGGTGGTGGCGGATCTGGTGGCGGTGGCAGTGATATCGAACTGACCCAGCC |
| | | TCCGAGCGTTAGCGTTGCACCGGGTCAGACCGCACGTATTAGCTGTAGCGGTGATAGTCTGCGTAATAAAGTT |
| | | TATTGGTATCAGCAGAAACCGGGTCAGGCTCCGGTTCTGGTTATTTATAAAAATAATCGTCCGAGCGGTATTC |
| | | CGGAACGTTTTAGCGGTAGCAATAGCGGTAATACCGCAACCCTGACCATTAGCGGCACCCAGGCAGAAGATG |
| | | AAGCCGATTATTATTGTCAGAGCTATGATGGTCAGAAAAGCCTGGTTTTTGGTGGTGGCACCAAGCTTACCGT |
| | | TCTG |
| SEQ ID NO: 189 | Heavy | QVQLKESGPALVKPTQTLTLTCTFSGFSLSNRGGGVGWIRQPPGKALEWLAWIDWDDDKSYSTSLKTRLTISKDTS |
| | MOR06475 | KNQVVLTMTNMDPVDTATYYCARMHLPLVFDSWGQGTLVTVSSASTKGPSVFPLAPSSKSTSGGTAALGCLVKD |
| | hIgG1 LALA | YFPEPVTVSWNSGALTSGVHTFPAVLQSSGLYSLSSVVTVPSSSLGTQTYICNVNHKPSNTKVDKRVEPKSCDKTHT |
| | MOR08168 | CPPCPAPEAAGGPSVFLFPPKPKDTLMISRTPEVTCVVVDVSHEDPEVKFNWYVDGVEVHNAKTKPREEQYNSTY |
| | scFv (VH-4-VL) | RVVSVLTVLHQDWLNGKEYKCKVSNKALPAPIEKTISKAKGQPREPQVYTLPPSREEMTKNQVSLTCLVKGFYPSDI |
| | | AVEWESNGQPENNYKTTPPVLDSDGSFFLYSKLTVDKSRWQQGNVFSCSVMHEALHNHYTQKSLSLSPGKGGSG |
| | | GSQVQLVESGGGLVQPGGSLRLSCAASGFTFSDYVINWVRQAPGKGLEWVSGISWSGVNTHYADSVKGRFTISR |
| | | DNSKNTLYLQMNSLRAEDTAVYYCARLGATANNIRYKFMDVWGQGTLVTVSSGGGGSGGGGSGGGGSGGGGS |
| | | DIELTQPPSVSVAPGQTARISCSGDSLRNKVYWYQQKPGQAPVLVIYKNNRPSGIPERFSGSNSGNTATLTISGTQA |
| | | EDEADYYCQSYDGQKSLVFGGGTKLTVL |
| SEQ ID NO: 190 | DNA Heavy | CAGGTGCAATTGAAAGAAAGCGGCCCGGCCCTGGTGAAACCGACCCAAACCCTGACCCTGACCTGTACCTTTT |
| | MOR06475 | CCGGATTTAGCCTGTCTAATCGTGGTGGTGGTGTGGGTTGGATTCGCCAGCCGCCTGGGAAAGCCCTCGAGT |
| | hIgG1 LALA | GGCTGGCTTGGATCGATTGGGATGATGATAAGTCTTATAGCACCAGCCTGAAAACGCGTCTGACCATTAGCA |
| | MOR08168 | AAGATACTTCGAAAAATCAGGTGGTGCTGACTATGACCAACATGGACCCGGTGGATACGGCCACCTATTATTG |
| | scFv (VH-4-VL) | CGCGCGTATGCATCTTCCTCTTGTTTTTGATTCTTGGGGCCAAGGCACCCTGGTGACGGTTAGCTCAGCTAGCA |
| | | CCAAGGGCCCCAGCGTGTTCCCCCTGGCCCCCAGCAGCAAGAGCACCAGCGGCGGCACAGCCGCCCTGGGCT |
| | | GCCTGGTGAAGGACTACTTCCCCGAGCCCGTGACCGTGTCCTGGAACAGCGGAGCCCTGACCTCCGGCGTGC |
| | | ACACCTTCCCCGCCGTGCTGCAGAGCAGCGGCCTGTACAGCCTGTCCAGCGTGGTGACAGTGCCCAGCAGCA |
| | | GCCTGGGCACCCAGACCTACATCTGCAACGTGAACCACAAGCCCAGCAACACCAAGGTGGACAAGAGAGTG |
| | | GAGCCCAAGAGCTGCGACAAGACCCACACCTGCCCCCCCTGCCCAGCCCCAGAGGCAGCGGGCGGACCCTCC |
| | | GTGTTCCTGTTCCCCCCCAAGCCCAAGGACACCCTGATGATCAGCAGGACCCCCGAGGTGACCTGCGTGGTG |
| | | GTGGACGTGAGCCACGAGGACCCAGAGGTGAAGTTCAACTGGTACGTGGACGGCGTGGAGGTGCACAACGC |
| | | CAAGACCAAGCCCAGAGAGGAGCAGTACAACAGCACCTACAGGGTGGTGTCCGTGCTGACCGTGCTGCACCA |
| | | GGACTGGCTGAACGGCAAGGAATACAAGTGCAAGGTCTCCAACAAGGCCCTGCCAGCCCCCATCGAAAAGAC |
| | | CATCAGCAAGGCCAAGGGCCAGCCACGGGAGCCCCAGGTGTACACCCTGCCCCCCTCCCGGGAGGAGATGA |
| | | CCAAGAACCAGGTGTCCCTGACCTGTCTGGTGAAGGGCTTCTACCCCAGCGACATCGCCGTGGAGTGGGAGA |
| | | GCAACGGCCAGCCCGAGAACAACTACAAGACCACCCCCCCAGTGCTGGACAGCGACGGCAGCTTCTTCCTGT |
| | | ACAGCAAGCTGACCGTGGACAAGTCCAGGTGGCAGCAGGGCAACGTGTTCAGCTGCAGCGTGATGCACGAA |
| | | GCGCTGCACAACCACTACACCCAGAAGAGCCTGAGCCTGTCCCCCGGCAAGGGCGGCTCCGGCGGAAGCCA |
| | | GGTTCAATTGGTTGAAAGCGGTGGTGGTCTGGTTCAGCCTGGTGGTAGCCTGCGTCTGAGCTGTGCAGCAAG |
| | | CGGTTTTACCTTTAGCGATTATGTGATTAATTGGGTTCGTCAGGCACCGGGTAAAGGTCTGGAATGGGTTAGC |
| | | GGTATTAGCTGGTCAGGTGTTAATACCCATTATGCAGATAGCGTGAAAGGTCGTTTTACCATTAGCCGTGATA |
| | | ATAGCAAAAATACCCTGTATCTGCAGATGAATAGCCTGCGTGCAGAAGATACCGCAGTTTATTATTGTGCACG |
| | | TCTGGGTGCAACCGCAAATAATATTCGCTATAAATTTATGGATGTGTGGGGTCAGGGTACACTAGTTACCGTT |
| | | AGCAGTGGTGGTGGTGGTAGCGGTGGTGGCGGATCTGGTGGCGGTGGTTCAGGTGGTGGTGGCAGTGATA |
| | | TCGAACTGACCCAGCCTCCGAGCGTTAGCGTTGCACCGGGTCAGACCGCACGTATTAGCTGTAGCGGTGATA |
| | | GTCTGCGTAATAAAGTTTATTGGTATCAGCAGAAACCGGGTCAGGCTCCGGTTCTGGTTATTTATAAAAATAA |
| | | TCGTCCGAGCGGTATTCCGGAACGTTTTAGCGGTAGCAATAGCGGTAATACCGCAACCCTGACCATTAGCGGC |
| | | ACCCAGGCAGAAGATGAAGCCGATTATTATTGTCAGAGCTATGATGGTCAGAAAAGCCTGGTTTTTGGTGGT |
| | | GGCACCAAGCTTACCGTTCTG |
| SEQ ID NO: 191 | VL | DIELTQPPSVSVAPGQTARISCSGDSLRNKVYWYQQKPGQAPVLVIYKNNRPSGIPERFSGSNSGNTATLTISGTQA |
| | MOR08168 wt | EDEADYYCQSYDGQKSLVFGGGTKLTVL |
| SEQ ID NO: 192 | DNA VL | GACATCGAGCTGACTCAGCCCCCTAGCGTGTCAGTGGCTCCTGGCCAGACCGCTAGAATTAGCTGTAGCGGC |
| | MOR08168 wt | GATAGCCTGCGTAACAAGGTCTACTGGTATCAGCAGAAGCCCGGCCAGGCCCCTGTGCTGGTCATCTATAAG |
| | | AACAATAGGCCTAGCGGCATCCCCGAGCGGTTTAGCGGCTCTAATAGCGGCAACACCGCTACCCTGACTATTA |
| | | GCGGCACTCAGGCCGAGGACGAGGCCGACTACTACTGTCAGTCCTACGACGGCCAGAAGTCACTGGTCTTTG |
| | | GCGGCGGAACTAAGCTGACCGTGCTG |
| SEQ ID NO: 193 | Light lambda | DIELTQPPSVSVAPGQTARISCSGDSLRNKVYWYQQKPGQAPVLVIYKNNRPSGIPERFSGSNSGNTATLTISGTQA |
| | MOR08168 wt | EDEADYYCQSYDGQKSLVFGGGTKLTVLGQPKAAPSVTLFPPSSEELQANKATLVCLISDFYPGAVTVAWKADSSP |
| | | VKAGVETTTPSKQSNNKYAASSYLSLTPEQWKSHRSYSCQVTHEGSTVEKTVAPTECS |
| SEQ ID NO: 194 | DNA Light | GACATCGAGCTGACTCAGCCCCCTAGCGTGTCAGTGGCTCCTGGCCAGACCGCTAGAATTAGCTGTAGCGGC |
| | lambda | GATAGCCTGCGTAACAAGGTCTACTGGTATCAGCAGAAGCCCGGCCAGGCCCCTGTGCTGGTCATCTATAAG |
| | MOR08168 wt | AACAATAGGCCTAGCGGCATCCCCGAGCGGTTTAGCGGCTCTAATAGCGGCAACACCGCTACCCTGACTATTA |
| | | GCGGCACTCAGGCCGAGGACGAGGCCGACTACTACTGTCAGTCCTACGACGGCCAGAAGTCACTGGTCTTTG |
| | | GCGGCGGAACTAAGCTGACCGTGCTGGGACAGCCTAAGGCTGCCCCCAGCGTGACCCTGTTCCCCCCCAGCA |
| | | GCGAGGAGCTGCAGGCCAACAAGGCCACCCTGGTGTGCCTGATCAGCGACTTCTACCCAGGCGCCGTGACCG |
| | | TGGCCTGGAAGGCCGACAGCAGCCCCGTGAAGGCCGGCGTGGAGACCACCACCCCCAGCAAGCAGAGCAAC |
| | | AACAAGTACGCCGCCAGCAGCTACCTGAGCCTGACCCCCGAGCAGTGGAAGAGCCACAGGTCCTACAGCTGC |
| | | CAGGTGACCCACGAGGGCAGCACCGTGGAAAAGACCGTGGCCCCAACCGAGTGCAGC |
| SEQ ID NO: 195 | Heavy | QVQLVESGGGLVQPGGSLRLSCAASGFTFSDYVINWVRQAPGKGLEWVSGISWSGVNTHYADSVKGRFTISRDN |
| | MOR08168IgG1LALA_6475scFv | SKNTLYLQMNSLRAEDTAVYYCARLGATANNIRYKFMDVWGQGTLVTVSSASTKGPSVFPLAPSSKSTSGGTAAL |
| | | GCLVKDYFPEPVTVSWNSGALTSGVHTFPAVLQSSGLYSLSSVVTVPSSSLGTQTYICNVNHKPSNTKVDKRVEPKS |
| | wt | CDKTHTCPPCPAPEAAGGPSVFLFPPKPKDTLMISRTPEVTCVVVDVSHEDPEVKFNWYVDGVEVHNAKTKPREE |
| | | QYNSTYRVVSVLTVLHQDWLNGKEYKCKVSNKALPAPIEKTISKAKGQPREPQVYTLPPSREEMTKNQVSLTCLVK |
| | | GFYPSDIAVEWESNGQPENNYKTTPPVLDSDGSFFLYSKLTVDKSRWQQGNVFSCSVMHEALHNHYTQKSLSLSP |
| | | GKGGSGGSDIVLTQSPATLSLSPGERATLSCRASQFIGSRYLAWYQQKPGQAPRLLIYGASNRATGVPARFSGSGSG |
| | | TDFTLTISSLEPEDFATYYCQQYYDYPQTFGQGTKVEIKGGGGSGGGGSGGGGSGGGGSQVQLKESGPALVKPTQ |
| | | TLTLTCTFSGFSLSNRGGGVGWIRQPPGKALEWLAWIDWDDDKSYSTSLKTRLTISKDTSKNQVVLTMTNMDPV |
| | | DTATYYCARMHLPLVFDSWGQGTLVTVSS |
| SEQ ID NO: 196 | DNA Heavy | CAGGTGCAGCTGGTGGAATCAGGCGGAGGACTGGTCCAGCCTGGCGGATCACTTAGACTGAGCTGTGCCGC |
| | MOR08168IgG1LALA_6475scFv | TAGTGGCTTCACCTTTAGCGACTATGTGATTAACTGGGTCCGACAGGCCCCTGGCAAGGGACTGGAATGGGT |
| | | GTCAGGCATTAGTTGGAGCGGCGTGAACACTCACTACGCCGATAGCGTGAAGGGCCGGTTCACTATTAGCCG |
| | wt | GGATAACTCTAAGAACACCCTGTACCTGCAGATGAATAGCCTGAGAGCCGAGGACACCGCCGTCTACTACTG |
| | | CGCTAGACTGGGCGCTACCGCTAACAACATCCGCTATAAGTTCATGGACGTGTGGGGCCAGGGCACCCTGGT |
| | | CACAGTGTCTTCAGCTAGCACTAAGGGCCCCTCAGTGTTCCCCCTGGCCCCTAGCTCTAAGTCTACTAGCGGTG |
| | | GCACCGCCGCTCTGGGCTGCCTGGTCAAGGACTACTTCCCCGAGCCCGTGACCGTGTCTTGGAATAGCGGCG |
| | | CTCTGACTAGCGGAGTGCACACCTTCCCCGCCGTGCTGCAGTCTAGCGGCCTGTATAGCCTGTCTAGCGTCGT |
| | | GACCGTGCCTAGCTCTAGCCTGGGCACTCAGACCTATATCTGTAACGTGAACCACAAGCCTAGTAACACTAAG |
| | | GTGGACAAGCGGGTGGAACCTAAGTCTTGCGATAAGACTCACACCTGTCCCCCCTGCCCTGCCCCAGAAGCTG |
| | | CTGGCGGACCTAGCGTGTTCCTGTTCCCACCTAAGCCTAAAGACACCCTGATGATTAGTAGGACCCCCGAAGT |
| | | GACCTGCGTGGTGGTGGACGTCAGCCACGAGGACCCTGAAGTGAAGTTCAATTGGTATGTGGACGGCGTGG |
| | | AAGTGCACAACGCTAAGACTAAGCCTAGAGAGGAACAGTATAACTCCACCTATAGGGTGGTGTCAGTGCTGA |
| | | CCGTGCTGCACCAGGACTGGCTGAACGGCAAAGAGTATAAGTGTAAAGTCTCTAACAAGGCCCTGCCTGCCC |
| | | CTATCGAAAAGACTATCTCTAAGGCTAAGGGCCAGCCTAGAGAACCCCAGGTCTACACCCTGCCCCCTAGTAG |
| | | AGAAGAGATGACTAAGAATCAGGTGTCCCTGACCTGTCTGGTCAAGGGCTTCTACCCTAGCGATATCGCCGTG |
| | | GAGTGGGAGTCTAACGGCCAGCCCGAGAACAACTATAAGACTACCCCCCCTGTGCTGGATAGCGACGGCTCT |
| | | TTCTTCCTGTACTCTAAACTGACCGTGGACAAGTCTAGGTGGCAGCAGGGCAACGTGTTCAGCTGTAGCGTGA |
| | | TGCACGAGGCCCTGCACAATCACTACACTCAGAAGTCACTGAGCCTGAGTCCCGGCAAGGGCGGCTCAGGCG |
| | | GTAGCGATATCGTGCTGACTCAGTCACCCGCTACCCTGAGTCTGAGCCCTGGCGAGCGGGCTACACTGAGCT |
| | | GTAGAGCTAGTCAGTTTATCGGCTCACGCTACCTGGCCTGGTATCAGCAGAAGCCCGGCCAGGCCCCTAGACT |
| | | GCTGATCTACGGCGCTAGTAATAGAGCTACCGGCGTGCCCGCTAGGTTTAGCGGCTCAGGATCAGGCACCGA |
| | | CTTTACCCTGACTATTAGTAGCCTGGAACCCGAGGACTTCGCTACCTACTACTGTCAGCAGTACTACGACTACC |
| | | CTCAGACCTTCGGCCAGGGAACTAAGGTCGAGATTAAGGGCGGTGGCGGTAGCGGCGGAGGCGGATCAGG |
| | | TGGTGGTGGTAGTGGCGGCGGAGGTAGTCAGGTCCAGCTGAAAGAGTCAGGCCCTGCCCTGGTCAAGCCTA |
| | | CTCAGACCCTGACCCTGACCTGCACTTTTAGCGGCTTTAGCCTGAGTAATAGAGGCGGCGGAGTGGGCTGGA |
| | | TTAGACAGCCTCCAGGCAAAGCCCTGGAGTGGCTGGCCTGGATCGACTGGGACGACGATAAGTCCTACTCCA |
| | | CTAGCCTGAAAACTAGGCTGACAATCAGCAAGGACACTAGTAAAAACCAGGTGGTGCTGACTATGACTAATA |
| | | TGGACCCCGTGGACACCGCTACCTATTATTGCGCTAGAATGCACCTCCCACTGGTGTTCGATAGCTGGGGTCA |
| | | GGGAACTCTGGTCACAGTCAGTAGC |
| SEQ ID NO: 197 | VL MOR08168 | SYELTQPPSVSVAPGQTARISCSGDSLRNKVYWYQQKPGQAPVLVIYKNNRPSGIPERFSGSNSGNTATLTISGTQA |
| | DI | EDEADYYCQSYDGQKSLVFGGGTKLTVL |
| SEQ ID NO: 198 | DNA VL | TCTTACGAGCTGACCCAGCCCCCTTCCGTGTCTGTGGCTCCTGGCCAGACCGCCAGAATCTCTTGCTCCGGCGA |
| | MOR08168 DI | CTCCCTGCGGAACAAGGTGTACTGGTATCAGCAGAAGCCCGGCCAGGCCCCTGTGCTGGTCATCTACAAGAA |
| | | CAACCGGCCCTCCGGCATCCCCGAGAGATTCTCTGGCTCCAACTCCGGCAACACCGCCACCCTGACAATCTCT |
| | | GGCACACAGGCCGAGGACGAGGCCGACTACTACTGCCAGTCCTACGACGGCCAGAAATCACTGGTGTTCGGC |
| | | GGAGGCACCAAGCTGACAGTGCTG |
| SEQ ID NO: 199 | Light lambda | SYELTQPPSVSVAPGQTARISCSGDSLRNKVYWYQQKPGQAPVLVIYKNNRPSGIPERFSGSNSGNTATLTISGTQA |
| | MOR08168 DI | EDEADYYCQSYDGQKSLVFGGGTKLTVLGQPKAAPSVTLFPPSSEELQANKATLVCLISDFYPGAVTVAWKADSSP |
| | | VKAGVETTTPSKQSNNKYAASSYLSLTPEQWKSHRSYSCQVTHEGSTVEKTVAPTECS |
| SEQ ID NO: 200 | DNA Light | TCTTACGAGCTGACCCAGCCCCCTTCCGTGTCTGTGGCTCCTGGCCAGACCGCCAGAATCTCTTGCTCCGGCGA |
| | lambda | CTCCCTGCGGAACAAGGTGTACTGGTATCAGCAGAAGCCCGGCCAGGCCCCTGTGCTGGTCATCTACAAGAA |
| | MOR08168 DI | CAACCGGCCCTCCGGCATCCCCGAGAGATTCTCTGGCTCCAACTCCGGCAACACCGCCACCCTGACAATCTCT |
| | | GGCACACAGGCCGAGGACGAGGCCGACTACTACTGCCAGTCCTACGACGGCCAGAAATCACTGGTGTTCGGC |
| | | GGAGGCACCAAGCTGACAGTGCTGGGACAGCCTAAGGCTGCCCCCAGCGTGACCCTGTTCCCCCCCAGCAGC |
| | | GAGGAGCTGCAGGCCAACAAGGCCACCCTGGTGTGCCTGATCAGCGACTTCTACCCAGGCGCCGTGACCGTG |
| | | GCCTGGAAGGCCGACAGCAGCCCCGTGAAGGCCGGCGTGGAGACCACCACCCCCAGCAAGCAGAGCAACAA |
| | | CAAGTACGCCGCCAGCAGCTACCTGAGCCTGACCCCCGAGCAGTGGAAGAGCCACAGGTCCTACAGCTGCCA |
| | | GGTGACCCACGAGGGCAGCACCGTGGAAAAGACCGTGGCCCCAACCGAGTGCAGC |
| SEQ ID NO: 201 | Heavy | QVQLVESGGGLVQPGGSLRLSCAASGFTFSDYVINWVRQAPGKGLEWVSGISWSGVNTHYADSVKGRFTISRDN |
| | MOR08168IgG1LALA_6475scFv | SKNTLYLQMNSLRAEDTAVYYCARLGATANNIRYKFMDVWGQGTLVTVSSASTKGPSVFPLAPSSKSTSGGTAAL |
| | | GCLVKDYFPEPVTVSWNSGALTSGVHTFPAVLQSSGLYSLSSVVTVPSSSLGTQTYICNVNHKPSNTKVDKRVEPKS |
| | DI | CDKTHTCPPCPAPEAAGGPSVFLFPPKPKDTLMISRTPEVTCVVVDVSHEDPEVKFNWYVDGVEVHNAKTKPREE |
| | | QYNSTYRVVSVLTVLHQDWLNGKEYKCKVSNKALPAPIEKTISKAKGQPREPQVYTLPPSREEMTKNQVSLTCLVK |
| | | GFYPSDIAVEWESNGQPENNYKTTPPVLDSDGSFFLYSKLTVDKSRWQQGNVFSCSVMHEALHNHYTQKSLSLSP |
| | | GKGGSGGSDIVLTQSPATLSLSPGERATLSCRASQFIGSRYLAWYQQKPGQAPRLLIYGASNRATGVPARFSGSGSG |
| | | TDFTLTISSLEPEDFATYYCQQYYDYPQTFGQGTKVEIKGGGGSGGGGSGGGGSGGGGSQVQLKESGPALVKPTQ |
| | | TLTLTCTFSGFSLSNRGGGVGWIRQPPGKALEWLAWIDWDDDKSYSTSLKTRLTISKDTSKNQVVLTMTNMDPV |
| | | DTATYYCARMHLPLVFDSWGQGTLVTVSS |
| SEQ ID NO: 202 | DNA Heavy | CAGGTGCAGCTGGTGGAATCAGGCGGAGGACTGGTCCAGCCTGGCGGATCACTTAGACTGAGCTGTGCCGC |
| | MOR08168IgG1LALA_6475scFv | TAGTGGCTTCACCTTTAGCGACTATGTGATTAACTGGGTCCGACAGGCCCCTGGCAAGGGACTGGAATGGGT |
| | | GTCAGGCATTAGTTGGAGCGGCGTGAACACTCACTACGCCGATAGCGTGAAGGGCCGGTTCACTATTAGCCG |
| | DI | GGATAACTCTAAGAACACCCTGTACCTGCAGATGAATAGCCTGAGAGCCGAGGACACCGCCGTCTACTACTG |
| | | CGCTAGACTGGGCGCTACCGCTAACAACATCCGCTATAAGTTCATGGACGTGTGGGGCCAGGGCACCCTGGT |
| | | CACAGTGTCTTCAGCTAGCACTAAGGGCCCCTCAGTGTTCCCCCTGGCCCCTAGCTCTAAGTCTACTAGCGGTG |
| | | GCACCGCCGCTCTGGGCTGCCTGGTCAAGGACTACTTCCCCGAGCCCGTGACCGTGTCTTGGAATAGCGGCG |
| | | CTCTGACTAGCGGAGTGCACACCTTCCCCGCCGTGCTGCAGTCTAGCGGCCTGTATAGCCTGTCTAGCGTCGT |
| | | GACCGTGCCTAGCTCTAGCCTGGGCACTCAGACCTATATCTGTAACGTGAACCACAAGCCTAGTAACACTAAG |
| | | GTGGACAAGCGGGTGGAACCTAAGTCTTGCGATAAGACTCACACCTGTCCCCCCTGCCCTGCCCCAGAAGCTG |
| | | CTGGCGGACCTAGCGTGTTCCTGTTCCCACCTAAGCCTAAAGACACCCTGATGATTAGTAGGACCCCCGAAGT |
| | | GACCTGCGTGGTGGTGGACGTCAGCCACGAGGACCCTGAAGTGAAGTTCAATTGGTATGTGGACGGCGTGG |
| | | AAGTGCACAACGCTAAGACTAAGCCTAGAGAGGAACAGTATAACTCCACCTATAGGGTGGTGTCAGTGCTGA |
| | | CCGTGCTGCACCAGGACTGGCTGAACGGCAAAGAGTATAAGTGTAAAGTCTCTAACAAGGCCCTGCCTGCCC |
| | | CTATCGAAAAGACTATCTCTAAGGCTAAGGGCCAGCCTAGAGAACCCCAGGTCTACACCCTGCCCCCTAGTAG |
| | | AGAAGAGATGACTAAGAATCAGGTGTCCCTGACCTGTCTGGTCAAGGGCTTCTACCCTAGCGATATCGCCGTG |
| | | GAGTGGGAGTCTAACGGCCAGCCCGAGAACAACTATAAGACTACCCCCCCTGTGCTGGATAGCGACGGCTCT |
| | | TTCTTCCTGTACTCTAAACTGACCGTGGACAAGTCTAGGTGGCAGCAGGGCAACGTGTTCAGCTGTAGCGTGA |
| | | TGCACGAGGCCCTGCACAATCACTACACTCAGAAGTCACTGAGCCTGAGTCCCGGCAAGGGCGGCTCAGGCG |
| | | GTAGCGATATCGTGCTGACTCAGTCACCCGCTACCCTGAGTCTGAGCCCTGGCGAGCGGGCTACACTGAGCT |
| | | GTAGAGCTAGTCAGTTTATCGGCTCACGCTACCTGGCCTGGTATCAGCAGAAGCCCGGCCAGGCCCCTAGACT |
| | | GCTGATCTACGGCGCTAGTAATAGAGCTACCGGCGTGCCCGCTAGGTTTAGCGGCTCAGGATCAGGCACCGA |
| | | CTTTACCCTGACTATTAGTAGCCTGGAACCCGAGGACTTCGCTACCTACTACTGTCAGCAGTACTACGACTACC |
| | | CTCAGACCTTCGGCCAGGGAACTAAGGTCGAGATTAAGGGCGGTGGCGGTAGCGGCGGAGGCGGATCAGG |
| | | TGGTGGTGGTAGTGGCGGCGGAGGTAGTCAGGTCCAGCTGAAAGAGTCAGGCCCTGCCCTGGTCAAGCCTA |
| | | CTCAGACCCTGACCCTGACCTGCACTTTTAGCGGCTTTAGCCTGAGTAATAGAGGCGGCGGAGTGGGCTGGA |
| | | TTAGACAGCCTCCAGGCAAAGCCCTGGAGTGGCTGGCCTGGATCGACTGGGACGACGATAAGTCCTACTCCA |
| | | CTAGCCTGAAAACTAGGCTGACAATCAGCAAGGACACTAGTAAAAACCAGGTGGTGCTGACTATGACTAATA |
| | | TGGACCCCGTGGACACCGCTACCTATTATTGCGCTAGAATGCACCTCCCACTGGTGTTCGATAGCTGGGGTCA |
| | | GGGAACTCTGGTCACAGTCAGTAGC |
| SEQ ID NO: 203 | VL MOR08168 | SYELTQPLSVSVALGQTARITCSGDSLRNKVYWYQQKPGQAPVLVIYKNNRPSGIPERFSGSNSGNTATLTISRAQA |
| | GL | GDEADYYCQSYDGQKSLVFGGGTKLTVL |
| SEQ ID NO: 204 | DNA VL | AGCTACGAGCTGACTCAGCCCCTGAGCGTGTCAGTGGCTCTGGGCCAGACCGCTAGAATCACCTGTAGCGGC |
| | MOR08168 GL | GATAGCCTGAGAAACAAGGTCTACTGGTATCAGCAGAAGCCCGGCCAGGCCCCTGTGCTGGTCATCTATAAG |
| | | AACAATAGGCCTAGCGGCATCCCCGAGCGGTTTAGCGGCTCTAATAGCGGCAACACCGCTACCCTGACTATTA |
| | | GTAGGGCTCAGGCCGGCGACGAGGCCGACTACTACTGTCAGTCCTACGACGGCCAGAAGTCACTGGTCTTTG |
| | | GCGGCGGAACTAAGCTGACCGTGCTG |
| SEQ ID NO: 205 | Light lambda | SYELTQPLSVSVALGQTARITCSGDSLRNKVYWYQQKPGQAPVLVIYKNNRPSGIPERFSGSNSGNTATLTISRAQA |
| | MOR08168 GL | GDEADYYCQSYDGQKSLVFGGGTKLTVLGQPKAAPSVTLFPPSSEELQANKATLVCLISDFYPGAVTVAWKADSSP |
| | | VKAGVETTTPSKQSNNKYAASSYLSLTPEQWKSHRSYSCQVTHEGSTVEKTVAPTECS |
| SEQ ID NO: 206 | DNA Light | AGCTACGAGCTGACTCAGCCCCTGAGCGTGTCAGTGGCTCTGGGCCAGACCGCTAGAATCACCTGTAGCGGC |
| | lambda | GATAGCCTGAGAAACAAGGTCTACTGGTATCAGCAGAAGCCCGGCCAGGCCCCTGTGCTGGTCATCTATAAG |
| | MOR08168 GL | AACAATAGGCCTAGCGGCATCCCCGAGCGGTTTAGCGGCTCTAATAGCGGCAACACCGCTACCCTGACTATTA |
| | | GTAGGGCTCAGGCCGGCGACGAGGCCGACTACTACTGTCAGTCCTACGACGGCCAGAAGTCACTGGTCTTTG |
| | | GCGGCGGAACTAAGCTGACCGTGCTGGGACAGCCTAAGGCTGCCCCCAGCGTGACCCTGTTCCCCCCCAGCA |
| | | GCGAGGAGCTGCAGGCCAACAAGGCCACCCTGGTGTGCCTGATCAGCGACTTCTACCCAGGCGCCGTGACCG |
| | | TGGCCTGGAAGGCCGACAGCAGCCCCGTGAAGGCCGGCGTGGAGACCACCACCCCCAGCAAGCAGAGCAAC |
| | | AACAAGTACGCCGCCAGCAGCTACCTGAGCCTGACCCCCGAGCAGTGGAAGAGCCACAGGTCCTACAGCTGC |
| | | CAGGTGACCCACGAGGGCAGCACCGTGGAAAAGACCGTGGCCCCAACCGAGTGCAGC |
| SEQ ID NO: 207 | Heavy | EVQLLESGGGLVQPGGSLRLSCAASGFTFSDYVINWVRQAPGKGLEWVSGISWSGVNTHYADSVKGRFTISRDNS |
| | MOR08168IgG1LALA_6475scFv | KNTLYLQMNSLRAEDTAVYYCARLGATANNIRYKFMDVWGQGTLVTVSSASTKGPSVFPLAPSSKSTSGGTAALG |
| | | CLVKDYFPEPVTVSWNSGALTSGVHTFPAVLQSSGLYSLSSVVTVPSSSLGTQTYICNVNHKPSNTKVDKRVEPKSC |
| | GL | DKTHTCPPCPAPEAAGGPSVFLFPPKPKDTLMISRTPEVTCVVVDVSHEDPEVKFNWYVDGVEVHNAKTKPREEQ |
| | | YNSTYRVVSVLTVLHQDWLNGKEYKCKVSNKALPAPIEKTISKAKGQPREPQVYTLPPSREEMTKNQVSLTCLVKGF |
| | | YPSDIAVEWESNGQPENNYKTTPPVLDSDGSFFLYSKLTVDKSRWQQGNVFSCSVMHEALHNHYTQKSLSLSPGK |
| | | GGSGGSDIVLTQSPATLSLSPGERATLSCRASQFIGSRYLAWYQQKPGQAPRLLIYGASNRATGVPARFSGSGSGTD |
| | | FTLTISSLEPEDFATYYCQQYYDYPQTFGQGTKVEIKGGGGSGGGGSGGGGSGGGGSQVQLKESGPALVKPTQTL |
| | | TLTCTFSGFSLSNRGGGVGWIRQPPGKALEWLAWIDWDDDKSYSTSLKTRLTISKDTSKNQVVLTMTNMDPVDT |
| | | ATYYCARMHLPLVFDSWGQGTLVTVSS |
| SEQ ID NO: 208 | DNA Heavy | GAGGTGCAGCTGCTGGAATCAGGCGGAGGACTGGTGCAGCCTGGCGGATCACTGAGACTGAGCTGTGCCGC |
| | MOR08168IgG1LALA_6475scFv | TAGTGGCTTCACCTTTAGCGACTATGTGATTAACTGGGTCCGACAGGCCCCTGGCAAGGGACTGGAATGGGT |
| | | GTCAGGCATTAGTTGGAGCGGCGTGAACACTCACTACGCCGATAGCGTGAAGGGCCGGTTCACTATTAGCCG |
| | GL | GGATAACTCTAAGAACACCCTGTACCTGCAGATGAATAGCCTGAGAGCCGAGGACACCGCCGTCTACTACTG |
| | | CGCTAGACTGGGCGCTACCGCTAACAACATCCGCTATAAGTTCATGGACGTGTGGGGCCAGGGCACCCTGGT |
| | | CACAGTGTCTTCAGCTAGCACTAAGGGCCCCTCAGTGTTCCCCCTGGCCCCTAGCTCTAAGTCTACTAGCGGTG |
| | | GCACCGCCGCTCTGGGCTGCCTGGTCAAGGACTACTTCCCCGAGCCCGTGACCGTGTCTTGGAATAGCGGCG |
| | | CTCTGACTAGCGGAGTGCACACCTTCCCCGCCGTGCTGCAGTCTAGCGGCCTGTATAGCCTGTCTAGCGTCGT |
| | | GACCGTGCCTAGCTCTAGCCTGGGCACTCAGACCTATATCTGTAACGTGAACCACAAGCCTAGTAACACTAAG |
| | | GTGGACAAGCGGGTGGAACCTAAGTCTTGCGATAAGACTCACACCTGTCCCCCCTGCCCTGCCCCAGAAGCTG |
| | | CTGGCGGACCTAGCGTGTTCCTGTTCCCACCTAAGCCTAAAGACACCCTGATGATTAGTAGGACCCCCGAAGT |
| | | GACCTGCGTGGTGGTGGACGTCAGCCACGAGGACCCTGAAGTGAAGTTCAATTGGTATGTGGACGGCGTGG |
| | | AAGTGCACAACGCTAAGACTAAGCCTAGAGAGGAACAGTATAACTCCACCTATAGGGTGGTGTCAGTGCTGA |
| | | CCGTGCTGCACCAGGACTGGCTGAACGGCAAAGAGTATAAGTGTAAAGTCTCTAACAAGGCCCTGCCTGCCC |
| | | CTATCGAAAAGACTATCTCTAAGGCTAAGGGCCAGCCTAGAGAACCCCAGGTCTACACCCTGCCCCCTAGTAG |
| | | AGAAGAGATGACTAAGAATCAGGTGTCCCTGACCTGTCTGGTCAAGGGCTTCTACCCTAGCGATATCGCCGTG |
| | | GAGTGGGAGTCTAACGGCCAGCCCGAGAACAACTATAAGACTACCCCCCCTGTGCTGGATAGCGACGGCTCT |
| | | TTCTTCCTGTACTCTAAACTGACCGTGGACAAGTCTAGGTGGCAGCAGGGCAACGTGTTCAGCTGTAGCGTGA |
| | | TGCACGAGGCCCTGCACAATCACTACACTCAGAAGTCACTGAGCCTGAGTCCCGGCAAGGGCGGCTCAGGCG |
| | | GTAGCGATATCGTGCTGACTCAGTCACCCGCTACCCTGAGTCTGAGCCCTGGCGAGCGGGCTACACTGAGCT |
| | | GTAGAGCTAGTCAGTTTATCGGCTCACGCTACCTGGCCTGGTATCAGCAGAAGCCCGGCCAGGCCCCTAGACT |
| | | GCTGATCTACGGCGCTAGTAATAGAGCTACCGGCGTGCCCGCTAGGTTTAGCGGCTCAGGATCAGGCACCGA |
| | | CTTTACCCTGACTATTAGTAGCCTGGAACCCGAGGACTTCGCTACCTACTACTGTCAGCAGTACTACGACTACC |
| | | CTCAGACCTTCGGCCAGGGAACTAAGGTCGAGATTAAGGGCGGTGGCGGTAGCGGCGGAGGCGGATCAGG |
| | | TGGTGGTGGTAGTGGCGGCGGAGGTAGTCAGGTCCAGCTGAAAGAGTCAGGCCCTGCCCTGGTCAAGCCTA |
| | | CTCAGACCCTGACCCTGACCTGCACTTTTAGCGGCTTTAGCCTGAGTAATAGAGGCGGCGGAGTGGGCTGGA |
| | | TTAGACAGCCTCCAGGCAAAGCCCTGGAGTGGCTGGCCTGGATCGACTGGGACGACGATAAGTCCTACTCCA |
| | | CTAGCCTGAAAACTAGGCTGACAATCAGCAAGGACACTAGTAAAAACCAGGTGGTGCTGACTATGACTAATA |
| | | TGGACCCCGTGGACACCGCTACCTATTATTGCGCTAGAATGCACCTCCCACTGGTGTTCGATAGCTGGGGTCA |
| | | GGGAACTCTGGTCACAGTCAGTAGC |

[0124] Antibodies that specifically bind to a LRP6 protein (e.g., human and/or cynomologus LRP6) are shown in Table 1 Supra and comprise a VH domain having an amino acid sequence of SEQ ID NOs: 14, 34, 36, 44, 60 and 62; and a VL domain having an amino acid sequence of SEQ ID NOs: 13, 33, 35, 43, 59, and 61. Additional antibodies that specifically bind a LRP6 protein (e.g., human and/or cynomologus LRP6) comprise a VH domain having an amino acid sequence of SEQ ID NOs: 82, 89, 106, 108, 128, 130, and 138; and a VL domain having an amino acid sequence of SEQ ID NOs: 81, 90, 105, 107, 127, and 129.

[0125] Other antibodies include amino acids that have been mutated, yet have at least 60%, 70%, 80%, 90%, 95% or 98% identity in the CDR regions with the CDR regions depicted in the sequences described in Table 1. In some embodiments, it includes mutant amino acid sequences wherein no more than 1, 2, 3, 4 or 5 amino acids have been mutated in the CDR regions when compared with the CDR regions depicted in the sequence described in Table 1, while still maintaining their specifity for the original antibody's epitope.

[0126] The present invention also provides nucleic acid sequences that encode VH, VL, the full length heavy chain, and the full length light chain of the antibodies that specifically bind to a LRP6 protein (e.g., human and/or cynomologus LRP6). Such nucleic acid sequences can be optimized for expression in mammalian cells (for example, Table 1 for MOR08168, MOR08545, and MOR06706 for β-propeller 1 antibodies and MOR06475, MOR08193, and MOR08473 for β-propeller 3 antibodies). Such nucleic acid sequences can further be used to produce LRP6 constructs.

[0127] The LRP6 antibodies bind to distinct LRP6 β-propeller regions. Propeller 1 antibodies bind to the β-propeller 1 domain and block Propeller 1-dependent Wnts such as Wnt1, Wnt2, Wnt6, Wnt7A, Wnt7B, Wnt9, Wnt10A, Wnt10B. Propeller 3 antibodies bind to the β-propeller 3 domain and block Propeller 3-dependent Wnts such as Wnt3a and Wnt3.

[0128] Other antibodies include those where the amino acids or nucleic acids encoding the amino acids have been mutated, yet have at least 60%, 70%, 80%, 90%, 95% or 98% identity to the sequences described in Table 1. In some embodiments, it include mutant amino acid sequences wherein no more than 1, 2, 3, 4 or 5 amino acids have been mutated in the variable regions when compared with the variable regions depicted in the sequence described in Table 1, while retaining substantially the same therapeutic activity.

[0129] Each of these antibodies can bind to LRP6, the VH, VL, full length light chain, and full length heavy chain sequences (amino acid sequences and the nucleotide sequences encoding the amino acid sequences) can be “mixed and matched” to create other LRP6 antibodies. Such “mixed and matched” LRP6 antibodies can be tested using the binding assays known in the art (e.g., ELISAs, and other assays described in the Example section). With these mixed and matched antibodies, a VH sequence from a particular VH/VL pairing should be replaced with a structurally similar VH sequence. Likewise a full length heavy chain sequence from a particular full length heavy chain/full length light chain pairing should be replaced with a structurally similar full length heavy chain sequence. Likewise, a VL sequence from a particular VH/VL pairing should be replaced with a structurally similar VL sequence. Likewise a full length light chain sequence from a particular full length heavy chain/full length light chain pairing should be replaced with a structurally similar full length light chain sequence. Accordingly, in one aspect, the invention provides an isolated monoclonal antibody or fragment thereof having: a heavy chain variable region comprising an amino acid sequence selected from the group consisting of SEQ ID NOs: 14, 34, 36, 44, 60, and 62; and a light chain variable region comprising an amino acid sequence selected from the group consisting of SEQ ID NOs: 13, 33, 35, 43, 59 and 61; a heavy chain selected from the group consisting of SEQ ID NOs: 82, 106, 108, 128, 130 and 138; and a light chain variable region comprising an amino acid sequence selected from the group consisting of SEQ ID NOs: 81, and 90, 105, 107, 127, 129, and 137; wherein the antibody specifically binds to LRP6 (e.g., human and/or cynomologus LRP6).

[0130] LRP6 antibodies that bind to the β propeller 1 domain of LRP6 that comprise the heavy chain and light chain CDR1s, CDR2s and CDR3s (or combinations thereof) are described in Table 1. The amino acid sequences of the VH CDR1s of the antibodies are shown in SEQ ID NOs: 1, 21, and 47. The amino acid sequences of the VH CDR2s of the antibodies are shown in SEQ ID NOs: 2, 22, and 48. The amino acid sequences of the VH CDR3s of the antibodies are shown in SEQ ID NOs: 3, 23, and 49. The amino acid sequences of the VL CDR1s of the antibodies are shown in SEQ ID NOs: 4, 24, and 50. The amino acid sequences of the VL CDR2s of the antibodies are shown in SEQ ID NOs: 5, 25, and 51. The amino acid sequences of the VL CDR3s of the antibodies are shown in SEQ ID NOs: 6, 26, and 52. The CDR regions are delineated using the Kabat system (Kabat et al., (1991) Sequences of Proteins of Immunological Interest, Fifth Edition, U.S. Department of Health and Human Services, NIH Publication No. 91-3242; Chothia et al., (1987) J. Mol. Biol. 196: 901-917; Chothia et al., (1989) Nature 342: 877-883; and Al-Lazikani et al., (1997) J. Mol. Biol. 273, 927-948).

[0131] LRP6 antibodies that bind to the β propeller 3 domain of LRP6 that comprise the heavy chain and light chain CDR1s, CDR2s and CDR3s (or combinations thereof) are described in Table 1. The amino acid sequences of the VH CDR1s of the antibodies are shown in SEQ ID NOs: 69, 93, and 115. The amino acid sequences of the VH CDR2s of the antibodies are shown in SEQ ID NOs: 70, 94, and 116. The amino acid sequences of the VH CDR3s of the antibodies are shown in SEQ ID NOs: 71, 95, and 117. The amino acid sequences of the VL CDR1s of the antibodies are shown in SEQ ID NOs: 72, 96, and 118. The amino acid sequences of the VL CDR2s of the antibodies are shown in SEQ ID NOs: 73, 97, and 119. The amino acid sequences of the VL CDR3s of the antibodies are shown in SEQ ID NOs: 74, 98, and 120. Given that each of these antibodies can bind to LRP6 and that antigen-binding specificity is provided primarily by the CDR1, 2 and 3 regions, the VH CDR1, 2 and 3 sequences and VL CDR1, 2 and 3 sequences can be “mixed and matched” (i.e., CDRs from different antibodies can be mixed and match, although each antibody must contain a VH CDR1, 2 and 3 and a VL CDR1, 2 and 3 to create other LRP6 binding molecules. Such “mixed and matched” LRP6 antibodies can be tested using the binding assays known in the art and those described in the Examples (e.g., ELISAs). When VH CDR sequences are mixed and matched, the CDR1, CDR2 and/or CDR3 sequence from a particular VH sequence should be replaced with a structurally similar CDR sequence(s). Likewise, when VL CDR sequences are mixed and matched, the CDR1, CDR2 and/or CDR3 sequence from a particular VL sequence should be replaced with a structurally similar CDR sequence(s). It will be readily apparent to the ordinarily skilled artisan that novel VH and VL sequences can be created by substituting one or more VH and/or VL CDR region sequences with structurally similar sequences from the CDR sequences shown herein for monoclonal antibodies of the present invention.

[0132] Accordingly, the present invention provides an isolated LRP6 β-propeller 1 monoclonal antibody or fragment thereof comprising a heavy chain variable region CDR1 comprising an amino acid sequence selected from the group consisting of SEQ ID NOs: 1, 21, and 47; a heavy chain variable region CDR2 comprising an amino acid sequence selected from the group consisting of SEQ ID NOs: 2, 22, and 48; a heavy chain variable region CDR3 comprising an amino acid sequence selected from the group consisting of SEQ ID NOs: 3, 23, and 49; a light chain variable region CDR1 comprising an amino acid sequence selected from the group consisting of SEQ ID NOs: 4, 24, and 50; a light chain variable region CDR2 comprising an amino acid sequence selected from the group consisting of SEQ ID NOs: 5, 25, and 51; and a light chain variable region CDR3 comprising an amino acid sequence selected from the group consisting of SEQ ID NOs: 6, 26, and 52; wherein the antibody binds LRP6.

[0133] Accordingly, the present invention provides an isolated LRP6 β-propeller 3 monoclonal antibody or fragment thereof comprising a heavy chain variable region CDR1 comprising an amino acid sequence selected from the group consisting of SEQ ID NOs: 69, 93, and 115; a heavy chain variable region CDR2 comprising an amino acid sequence selected from the group consisting of SEQ ID NOs: 70, 94, and 116; a heavy chain variable region CDR3 comprising an amino acid sequence selected from the group consisting of SEQ ID NOs: 71, 95, and 117; a light chain variable region CDR1 comprising an amino acid sequence selected from the group consisting of SEQ ID NOs: 72, 96, and 118; a light chain variable region CDR2 comprising an amino acid sequence selected from the group consisting of SEQ ID NOs: 73, 97, and 119; and a light chain variable region CDR3 comprising an amino acid sequence selected from the group consisting of SEQ ID NOs: 74, 98, and 120; wherein the antibody binds LRP6.

[0134] In a specific embodiment, an antibody that binds to LRP6 comprises a heavy chain variable region CDR1 of SEQ ID NO: 1; a heavy chain variable region CDR2 of SEQ ID NO: 2; a heavy chain variable region CDR3 of SEQ ID NO: 3; a light chain variable region CDR1 of SEQ ID NO: 4; a light chain variable region CDR2 of SEQ ID NO: 5; and a light chain variable region CDR3 of SEQ ID NO: 6.

[0135] In a specific embodiment, an antibody that binds to LRP6 comprises a heavy chain variable region CDR1 of SEQ ID NO: 21; a heavy chain variable region CDR2 of SEQ ID NO: 22; a heavy chain variable region CDR3 of SEQ ID NO: 23; a light chain variable region CDR1 of SEQ ID NO: 24; a light chain variable region CDR2 of SEQ ID NO: 25; and a light chain variable region CDR3 of SEQ ID NO: 26.

[0136] In a specific embodiment, an antibody that binds to LRP6 comprises a heavy chain variable region CDR1 of SEQ ID NO: 47; a heavy chain variable region CDR2 of SEQ ID NO: 48; a heavy chain variable region CDR3 of SEQ ID NO: 49; a light chain variable region CDR1 of SEQ ID NO: 50; a light chain variable region CDR2 of SEQ ID NO: 51; and a light chain variable region CDR3 of SEQ ID NO: 52.

[0137] In a specific embodiment, an antibody that binds to LRP6 comprises a heavy chain variable region CDR1 of SEQ ID NO: 69; a heavy chain variable region CDR2 of SEQ ID NO: 70; a heavy chain variable region CDR3 of SEQ ID NO: 71; a light chain variable region CDR1 of SEQ ID NO: 72; a light chain variable region CDR2 of SEQ ID NO: 73; and a light chain variable region CDR3 of SEQ ID NO: 74.

[0138] In a specific embodiment, an antibody that binds to LRP6 comprises a heavy chain variable region CDR1 of SEQ ID NO: 93; a heavy chain variable region CDR2 of SEQ ID NO: 94; a heavy chain variable region CDR3 of SEQ ID NO: 95; a light chain variable region CDR1 of SEQ ID NO: 96; a light chain variable region CDR2 of SEQ ID NO: 97; and a light chain variable region CDR3 of SEQ ID NO: 98.

[0139] In a specific embodiment, an antibody that binds to LRP6 comprises a heavy chain variable region CDR1 of SEQ ID NO: 115; a heavy chain variable region CDR2 of SEQ ID NO: 116; a heavy chain variable region CDR3 of SEQ ID NO: 117; a light chain variable region CDR1 of SEQ ID NO: 118; a light chain variable region CDR2 of SEQ ID NO: 119; and a light chain variable region CDR3 of SEQ ID NO: 120.

[0140] In a specific embodiment, an antibody that binds to LRP6 comprises a VH of SEQ ID NO: 14 and VL of SEQ ID NO: 13. In a specific embodiment, an antibody that binds to LRP6 comprises a VH of SEQ ID NO: 34 and VL of SEQ ID NO: 33. In a specific embodiment, an antibody that binds to LRP6 comprises a VH of SEQ ID NO: 35 and VL of SEQ ID NO: 36. In a specific embodiment, an antibody that binds to LRP6 comprises a VH of SEQ ID NO; 43 and VL of SEQ ID NO: 44. In a specific embodiment, an antibody that binds to LRP6 comprises a VH of SEQ ID NO: 60 and VL of SEQ ID NO: 59. In a specific embodiment, an antibody that binds to LRP6 comprises a VH of SEQ ID NO; 62 and VL of SEQ ID NO: 61. In a specific embodiment, an antibody that binds to LRP6 comprises a SEQ ID NO: 82 and VL of SEQ ID NO: 81. In a specific embodiment, an antibody that binds to LRP6 comprises a VH of SEQ ID NO; 90 and VL of SEQ ID NO: 89. In a specific embodiment, an antibody that binds to LRP6 comprises a VH of SEQ ID NO: 106 and VL of SEQ ID NO: 105. In a specific embodiment, an antibody that binds to LRP6 comprises a VH of SEQ ID NO: 108 and VL of SEQ ID NO: 107. In a specific embodiment, an antibody that binds to LRP6 comprises a VH of SEQ ID NO: 128 and VL of SEQ ID NO: 127. In a specific embodiment, an antibody that binds to LRP6 comprises a VH of SEQ ID NO: 130 and VL of SEQ ID NO: 129. In a specific embodiment, an antibody that binds to LRP6 comprises a VH of SEQ ID NO: 138 and VL of SEQ ID NO: 137.

[0141] In one embodiment, the LRP6 antibodies are antagonist antibodies. In one embodiment, the LRP6 antibodies are agonist antibodies. In certain embodiments, an antibody that binds to LRP6 is an antibody that is described in Table 1.

[0142] As used herein, a human antibody comprises heavy or light chain variable regions or full length heavy or light chains that are “the product of” or “derived from” a particular germline sequence if the variable regions or full length chains of the antibody are obtained from a system that uses human germline immunoglobulin genes. Such systems include immunizing a transgenic mouse carrying human immunoglobulin genes with the antigen of interest or screening a human immunoglobulin gene library displayed on phage with the antigen of interest. A human antibody that is “the product of” or “derived from” a human germline immunoglobulin sequence can be identified as such by comparing the amino acid sequence of the human antibody to the amino acid sequences of human germline immunoglobulins and selecting the human germline immunoglobulin sequence that is closest in sequence (i.e., greatest % identity) to the sequence of the human antibody. A human antibody that is “the product of” or “derived from” a particular human germline immunoglobulin sequence may contain amino acid differences as compared to the germline sequence, due to, for example, naturally occurring somatic mutations or intentional introduction of site-directed mutations. However, in the VH or VL framework regions, a selected human antibody typically is at least 90% identical in amino acids sequence to an amino acid sequence encoded by a human germline immunoglobulin gene and contains amino acid residues that identify the human antibody as being human when compared to the germline immunoglobulin amino acid sequences of other species (e.g., murine germline sequences). In certain cases, a human antibody may be at least 60%, 70%, 80%, 90%, or at least 95%, or even at least 96%, 97%, 98%, or 99% identical in amino acid sequence to the amino acid sequence encoded by the germline immunoglobulin gene. Typically, a recombinant human antibody will display no more than 10 amino acid differences from the amino acid sequence encoded by the human germline immunoglobulin gene in the VH or VL framework regions. In certain cases, the human antibody may display no more than 5, or even no more than 4, 3, 2, or 1 amino acid difference from the amino acid sequence encoded by the germline immunoglobulin gene.

### Homologous Antibodies

[0143] Also included within the scope of invention are antibody or fragment thereof comprising amino acid sequences that are homologous to the sequences described in Table 1, where the homologous antibody binds to a LRP6 protein (e.g., human and/or cynomologus LRP6), and retains the desired functional properties of those antibodies described in Table 1.

[0144] For example, an isolated monoclonal antibody (or fragment thereof) comprising a heavy chain variable region and a light chain variable region, wherein the heavy chain variable region comprises an amino acid sequence that is at least 80%, at least 90%, or at least 95% or at least 98% identical to an amino acid sequence selected from the group consisting of SEQ ID NOs: 14, 34, 36, 44, 60, and 62; the light chain variable region comprises an amino acid sequence that is at least 80%, at least 90%, at least 95%, or at least 98% identical to an amino acid sequence selected from the group consisting of SEQ ID NOs: 13, 33, 37, 43 59, and 61; wherein the antibody binds to β-propeller 1 of LRP6 (e.g., human and/or cynomologus LRP6), and inhibits the signaling activity of β-propeller 1 dependent Wnt proteins. The signaling activity can be measured in Wnt reporter gene assay or other measure of Wnt directed signaling (e.g., LRP6 phosphorylation, β-catenin stabilization and nuclear translocation, cellular proliferation/survival) as described herein. In a specific example, such antibodies have an EC₅₀ value in a Wnt1 assay of less than 10 nM when using conditioned medium or using transfected cells.

[0145] Another example, is an isolated monoclonal antibody (or fragment thereof) comprising a heavy chain variable region and a light chain variable region, wherein the heavy chain variable region comprises an amino acid sequence that is at least 80%, at least 90%, at least 95%, or at least 98%, or at least 98% identical to an amino acid sequence selected from the group consisting of SEQ ID NOs: 82, 89, 106, 108, 128, 130, and 138; the light chain variable region comprises an amino acid sequence that is at least 80%, at least 90%, at least 95%, or at least 98% identical to an amino acid sequence selected from the group consisting of SEQ ID NOs: 81, 90, 105, 107, 127, 129, and 137; wherein the antibody binds to β-propeller 3 of LRP6 (e.g., human and/or cynomologus LRP6), and inhibits the signaling activity of β-propeller 3 dependent Wnt proteins. The signaling activity can be measured in Wnt reporter gene assay or other measure of Wnt directed signaling (e.g., LRP6 phosphorylation, β-catenin stabilization and nuclear translocation, cellular proliferation/survival) as described herein. In a specific example, such antibodies have an EC₅₀ value in a Wnt3a assay of less than 10 nM when using conditioned medium or using transfected cells.

[0146] In other embodiments, the VH and/or VL amino acid sequences may be 50%, 60%, 70%, 80%, 90%, 95%, 96%, 97%, 98% or 99% identical to the sequences set forth in Table 1. In other embodiments, the VH and/or VL amino acid sequences may be identical except an amino acid substitution in no more than 1, 2, 3, 4 or 5 amino acid position. An antibody having VH and VL regions having high (i.e., 80% or greater) identity to the VH and VL regions of those Propeller 1 antibodies described in Table 1 can be obtained by mutagenesis (e.g., site-directed or PCR-mediated mutagenesis) of nucleic acid molecules encoding SEQ ID NOs: 14, 34, 60, 13, 33, and 59 respectively, followed by testing of the encoded altered antibody for retained function using the functional assays described herein.

[0147] An antibody having VH and VL regions having high (i.e., 80% or greater) identity to the VH and VL regions of those Propeller 3 antibodies described in Table 1 can be obtained by mutagenesis (e.g., site-directed or PCR-mediated mutagenesis) of nucleic acid molecules encoding SEQ ID NOs: 82, 106, 128, 81, 105, and 127 respectively, followed by testing of the encoded altered antibody for retained function using the functional assays described herein.

[0148] In other embodiments, the variable regions of heavy chain and/or light chain nucleotide sequences may be 60%, 70%, 80%, 90%, 95%, 96%, 97%, 98% or 99% identical to the sequences set forth above. These homologous antibodies or fragments thereof can be used to generate the LRP6 constructs,

Antibodies with Conservative Modifications

[0149] Also included within the scope are antibodies with conservative modifications. The antibody has a heavy chain variable region comprising CDR1, CDR2, and CDR3 sequences and a light chain variable region comprising CDR1, CDR2, and CDR3 sequences, wherein one or more of these CDR sequences have specified amino acid sequences or conservative modifications thereof, wherein the antibodies with conservative modifications or fragments thereof specifically bind to LRP6, and inhibits LRP6 activity by inhibiting a Wnt signaling pathway, which can be measured in Wnt reporter gene assay or other measure of Wnt directed signaling (e.g., LRP6 phosphorylation, β-catenin stabilization and nuclear translocation, cellular proliferation/survival) as described herein. These antibodies or fragments thereof with conservative modifications can be used to generate the LRP6 constructs of the invention.

Antibodies that Bind to the Same Epitope

[0150] Also within the scope are antibodies that bind to the same epitope as do the LRP6 antibodies described in Table 1. Additional antibodies can therefore be identified based on their ability to cross-compete (e.g., to competitively inhibit the binding of, in a statistically significant manner) with other antibodies in LRP6 binding assays disclosed herein. The ability of a test antibody to inhibit the binding of antibodies of the present invention to a LRP6 protein (e.g., human and/or cynomologus LRP6) demonstrates that the test antibody can compete with that antibody for binding to LRP6; such an antibody may, according to non-limiting theory, bind to the same or a related (e.g., a structurally similar or spatially proximal) epitope on the LRP6 protein as the antibody with which it competes. In an embodiment, the antibody that binds to the same epitope on LRP6 as the antibodies of the present invention is a human monoclonal antibody. Such human monoclonal antibodies can be prepared and isolated as described herein. These antibodies or fragments thereof that bind to the same epitope can be used to generate the LRP6 constructs of the invention.

### 2. Antibody Fragments

[0151] In one embodiment, the LRP6 constructs are produced by using at least one antibody fragment linked to an half-life extender such that the LRP6 construct binds to LRP6 and inhibits Wnt signaling without potentiation of the Wnt signal and displays an increased half-life in vitro and in vivo. The antibody fragments of an antibody should retain the ability to bind with specificity to a target antigen. Antibody fragments include separate variable heavy chains, variable light chains, Fab, Fab′, F(ab′)₂, Fabc, and scFab. Fragments can be produced by enzymatic or chemical separation of intact immunoglobulins. For example, a F(ab′)₂ fragment can be obtained from an IgG molecule by proteolytic digestion with pepsin at pH 3.0-3.5 using standard methods such as those described in Harlow and Lane, Antibodies: A Laboratory Manual, Cold Spring Harbor Pubs., N.Y. (1988). Fab fragments may be obtained from F(ab′)₂ fragments by limited reduction, or from whole antibody by digestion with papain in the presence of reducing agents. Fragments can also be produced by recombinant DNA techniques. Segments of nucleic acids encoding selected fragments are produced by digestion of full-length coding sequences with restriction enzymes, or by de novo synthesis. Often fragments are expressed in the form of phage-coat fusion proteins. This manner of expression is advantageous for affinity-sharpening of antibodies.

scFv

[0152] A “single-chain antibody” (scFv) is an antibody fragment that consists of a single polypeptide chain comprising a VL domain linked to a VH-domain wherein VL domain and VH domain are paired to form a monovalent molecule. Single chain antibody can be prepared according to method known in the art (see, for example, Bird et al., (1988) Science 242:423-426 and Huston et al., (1988) Proc. Natl. Acad. Sci. USA 85:5879-5883). In one embodiment, LRP6 constructs are produced using scFvs as the LRP6 binding moiety by linking at least one half-life extender. The VH and VL domains used to make the scFv may be derived from the same or from different antibodies and linked together. The scFv comprises at least one, two, three, four, five, or six CDRs.

Methods for Generating scFvs and Mutant scFvs are Shown in PCT/EP2011/057200, Filed May 6, 2011; and PCT/EP2011/057202, Filed May 6, 2011, the Contents of which are Incorporated Herein by Reference in their Entirety). The Results for Thermostability of scFv are Depicted in FIGS. 32-35.

[0153] The scFv may be linked to the half-life extender in many different orientations. In one embodiment, at least one scFv is linked to the C-terminus of the half-life extender. In other embodiment, at least one scFv is linked to the N-terminus of the half-life extender. In other embodiment, at least one scFvs is linked to both the N-terminus and C-terminus of the half-life extender.

[0154] Linkers

[0155] ScFv molecules can be produced by linking VH and VL regions together using linkers. The scFv molecules comprise an scFv linker (e.g., a Ser-Gly linker) with an optimized length and/or amino acid composition. It is known that linker length can greatly affect how the variable regions of an scFv fold and interact. In fact, if a short linker is employed (e.g., between 5-10 amino acids; between 5-20 amino acids) intrachain folding is prevented and interchain folding is required to bring the two variable regions together to form a functional epitope binding site. For examples of linker orientation and size see, e.g., Hollinger et al. 1993 Proc Natl Acad. Sci. U.S.A. 90:6444-6448, U.S. Patent Application Publication Nos. 2005/0100543, 2005/0175606, 2007/0014794, and PCT publication Nos. WO2006/020258 and WO2007/024715, is incorporated herein by reference.

[0156] The scFv can comprise a linker sequence of at least 1, 2, 3, 4, 5, 6, 7, 8, 9, 10, 11, 12, 13, 14, 15, 16, 17, 18, 19, 20, 25, 30, 35, 40, 45, 50, 55, 60, 65, 70, 75, or more amino acid residues between its VL and VH regions. The linker sequence may be comprised of any naturally occurring amino acid. In some embodiments, the amino acids glycine and serine comprise the amino acids within the linker sequence. In another embodiment, the linker region orientation comprises sets of glycine repeats (Gly₄Ser)ₙ, where n is a positive integer equal to or greater than 1.

[0157] In one embodiment, the linkers include, but are not limited to, (Gly₄ Ser)₄ or (Gly₄Ser)₃. In another embodiment, the linkers Glu and Lys residues can be interspersed within the Gly-Ser linkers for better solubility. In another embodiment, the linkers include multiple repeats of (Gly₂Ser), (GlySer) or (Gly₃Ser). In another embodiment, the linkers include combinations and multiples of (Gly₃Ser)+(Gly₄Ser)+(GlySer). In another embodiment, Ser can be replaced with Ala e.g., (Gly₄Ala) or (Gly₃Ala). In yet another embodiment, the linker comprises the motif (GluAlaAlaAlaLys)ₙ, where n is a positive integer equal to or greater than 1.

[0158] scFv linkers can be of varying lengths. In one embodiment, an scFv linker is from about 5 to about 50 amino acids in length. In another embodiment, an scFv linker is from about 10 to about 40 amino acids in length. In another embodiment, an scFv linker is from about 15 to about 30 amino acids in length. In another embodiment, an scFv linker is from about 15 to about 20 amino acids in length. Variation in linker length may retain or enhance activity, giving rise to superior efficacy in activity studies. scFv linkers can be introduced into polypeptide sequences using techniques known in the art. For example, PCR mutagenesis can be used. Modifications can be confirmed by DNA sequence analysis. Plasmid DNA can be used to transform host cells for stable production of the polypeptides produced.

[0159] In one embodiment, a scFv molecule comprises an scFv linker having the amino acid sequence of (Gly₄Ser)₃ or (Gly₄Ser)₄ interposed between a VH domain and a VL domain, wherein the VH and VL domains are linked by a disulfide bond.

[0160] The scFv molecules can further comprise at least one disulfide bond which links an amino acid in the VL domain with an amino acid in the VH domain. Cysteine residues are necessary to provide disulfide bonds. Disulfide bonds can be included in an scFv molecule. Modifications of the genes which encode the VH and VL domains may be accomplished using techniques known in the art, for example, site-directed mutagenesis.

[0161] Stability and Mutations

[0162] The stability of scFv molecules can be evaluated in reference to the biophysical properties (e.g., thermal stability) of a conventional control scFv molecule or a full length antibody. In one embodiment, the LRP6 construct has a thermal stability that is greater than about 0.1, about 0.25, about 0.5, about 0.75, about 1, about 1.25, about 1.5, about 1.75, about 2, about 2.5, about 3, about 3.5, about 4, about 4.5, about 5, about 5.5, about 6, about 6.5, about 7, about 7.5, about 8, about 8.5, about 9, about 9.5, about 10 degrees, about 11 degrees, about 12 degrees, about 13 degrees, about 14 degrees, or about 15 degrees Celsius than a control binding molecule (e.g. a conventional scFv molecule) in the described assays.

[0163] The improved thermal stability of the scFv is subsequently conferred to the entire LRP6 construct. The thermal stability of the scFv can be improved by at least about 2° C. or 3° C. as compared to a conventional antibody. In one embodiment, the scFv has a 1° C. improved thermal stability as compared to a conventional antibody. In another embodiment, the scFv has a 2° C. improved thermal stability as compared to a conventional antibody. In another embodiment, the scFv has a 4, 5, 6, 7, 8, 9, 10, 11, 12, 13, 14, 15° C. improved thermal stability as compared to a conventional antibody. Comparisons can be made, for example, between the scFv molecules disclosed herein and scFv molecules or Fab fragments of an antibody from which the scFv VH and VL were derived. Thermal stability can be measured using methods known in the art. For example, in one embodiment, Tm can be measured. Methods for measuring Tm and other methods of determining protein stability are described in more detail below.

[0164] Mutations in scFv alter the stability of the scFv and improve the overall stability of the scFv and the LRP6 construct comprising the mutated scFv compared to a LRP6 construct without the mutated in the scFv. Mutations to the scFv can be generated as shown in the Examples. Stability of the mutated scFv is compared against the unmutated scFv using measurements such as Tm, temperature denaturation and temperature aggregation as described in the Examples. The binding capacity of the mutant scFvs can be determined using assays such as ELISA.

[0165] In one embodiment, the scFv comprises at least one mutation such that the mutated scFv confers improved stability to the LRP6 construct. In another embodiment, the scFv comprises at least 1, 2, 3, 4, 5, 6, 7, 8, 9, 10 mutations such that the mutated scFv confers improved stability to the LRP6 construct. In another embodiment, the scFv comprises a combination of mutations such that the mutated scFv confers improved stability to the LRP6 construct.

[0166] Methods of Evaluating Protein Stability

[0167] To assess the stability of LRP6 constructs, the stability of the minimal domain of a multidomain protein, as well as the entire multidomain protein, is predicted using the methods and those described below. Such methods allow for the determination of multiple thermal unfolding transitions where the least stable domain either unfolds first or limits the overall stability threshold of a multidomain unit that unfolds cooperatively (i.e. a multidomain protein which exhibits a single unfolding transition). The least stable domain can be identified in a number of additional ways. Mutagenesis can be performed to probe which domain limits the overall stability. Additionally, protease resistance of a multidomain protein can be performed under conditions where the least stable domain is known to be intrinsically unfolded via DSC or other spectroscopic methods (Fontana, et al., (1997) Fold. Des., 2: R17-26; Dimasi et al. (2009) J. Mol. Biol. 393: 672-692). Once the least stable domain is identified, the sequence encoding this domain (or a portion thereof) may be employed as a test sequence in the methods.

[0168] a) Thermal Stability

[0169] The thermal stability of the compositions may be analyzed using a number of non-limiting biophysical or biochemical techniques known in the art. In certain embodiments, thermal stability is evaluated by analytical spectroscopy.

[0170] An exemplary analytical spectroscopy method is Differential Scanning Calorimetry (DSC). DSC employs a calorimeter which is sensitive to the heat absorbances that accompany the unfolding of most proteins or protein domains (see, e.g. Sanchez-Ruiz, et al., Biochemistry, 27: 1648-52, 1988). To determine the thermal stability of a protein, a sample of the protein is inserted into the calorimeter and the temperature is raised until the Fab or scFv unfolds. The temperature at which the protein unfolds is indicative of overall protein stability.

[0171] Another exemplary analytical spectroscopy method is Circular Dichroism (CD) spectroscopy. CD spectrometry measures the optical activity of a composition as a function of increasing temperature. Circular dichroism (CD) spectroscopy measures differences in the absorption of left-handed polarized light versus right-handed polarized light which arise due to structural asymmetry. A disordered or unfolded structure results in a CD spectrum very different from that of an ordered or folded structure. The CD spectrum reflects the sensitivity of the proteins to the denaturing effects of increasing temperature and is therefore indicative of a protein's thermal stability (see van Mierlo and Steemsma, J. Biotechnol., 79(3):281-98, 2000).

[0172] Another exemplary analytical spectroscopy method for measuring thermal stability is Fluorescence Emission Spectroscopy (see van Mierlo and Steemsma, supra). Yet another exemplary analytical spectroscopy method for measuring thermal stability is Nuclear Magnetic Resonance (NMR) spectroscopy (see, e.g. van Mierlo and Steemsma, supra).

[0173] The thermal stability of a composition can be measured biochemically. An exemplary biochemical method for assessing thermal stability is a thermal challenge assay. In a “thermal challenge assay”, a composition is subjected to a range of elevated temperatures for a set period of time. For example, in one embodiment, test scFv molecules or molecules comprising scFv molecules are subject to a range of increasing temperatures, e.g., for 1-1.5 hours. The activity of the protein is then assayed by a relevant biochemical assay. For example, if the protein is a binding protein (e.g. an scFv or scFv-containing polypeptide) the binding activity of the binding protein may be determined by a functional or quantitative ELISA.

[0174] Such an assay may be done in a high-throughput format and those disclosed in the Examples using E. coli and high throughput screening. A library of scFv variants may be created using methods known in the art. scFv expression may be induced an scFvs may be subjected to thermal challenge. The challenged test samples may be assayed for binding and those scFvs which are stable may be scaled up and further characterized.

[0175] Thermal stability is evaluated by measuring the melting temperature (Tm) of a composition using any of the above techniques (e.g. analytical spectroscopy techniques). The melting temperature is the temperature at the midpoint of a thermal transition curve wherein 50% of molecules of a composition are in a folded state (See e.g., Dimasi et al. (2009) J. Mol Biol. 393: 672-692). In one embodiment, Tm values for a scFv are about 40° C., 41° C., 42° C., 43° C., 44° C., 45° C., 46° C., 47° C., 48° C., 49° C., 50° C., 51° C., 52° C., 53° C., 54° C., 55° C., 56° C., 57° C., 58° C., 59° C., 60° C., 61° C., 62° C., 63° C., 64° C., 65° C., 66° C., 67° C., 68° C., 69° C., 70° C., 71° C., 72° C., 73° C., 74° C., 75° C., 76° C., 77° C., 78° C., 79° C., 80° C., 81° C., 82° C., 83° C., 84° C., 85° C., 86° C., 87° C., 88° C., 89° C., 90° C., 91° C., 92° C., 93° C., 94° C., 95° C., 96° C., 97° C., 98° C., 99° C., 100° C. In one embodiment, Tm values for an IgG is about 40° C., 41° C., 42° C., 43° C., 44° C., 45° C., 46° C., 47° C., 48° C., 49° C., 50° C., 51° C., 52° C., 53° C., 54° C., 55° C., 56° C., 57° C., 58° C., 59° C., 60° C., 61° C., 62° C., 63° C., 64° C., 65° C., 66° C., 67° C., 68° C., 69° C., 70° C., 71° C., 72° C., 73° C., 74° C., 75° C., 76° C., 77° C., 78° C., 79° C., 80° C., 81° C., 82° C., 83° C., 84° C., 85° C., 86° C., 87° C., 88° C., 89° C., 90° C., 91° C., 92° C., 93° C., 94° C., 95° C., 96° C., 97° C., 98° C., 99° C., 100° C. In one embodiment, Tm values for an multivalent antibody is about 40° C., 41° C., 42° C., 43° C., 44° C., 45° C., 46° C., 47° C., 48° C., 49° C., 50° C., 51° C., 52° C., 53° C., 54° C., 55° C., 56° C., 57° C., 58° C., 59° C., 60° C., 61° C., 62° C., 63° C., 64° C., 65° C., 66° C., 67° C., 68° C., 69° C., 70° C., 71° C., 72° C., 73° C., 74° C., 75° C., 76° C., 77° C., 78° C., 79° C., 80° C., 81° C., 82° C., 83° C., 84° C., 85° C., 86° C., 87° C., 88° C., 89° C., 90° C., 91° C., 92° C., 93° C., 94° C., 95° C., 96° C., 97° C., 98° C., 99° C., 100° C.

[0176] Thermal stability is also evaluated by measuring the specific heat or heat capacity (Cp) of a composition using an analytical calorimetric technique (e.g. DSC). The specific heat of a composition is the energy (e.g. in kcal/mol) is required to rise by 1° C., the temperature of 1 mol of water. As large Cp is a hallmark of a denatured or inactive protein composition. The change in heat capacity (ΔCp) of a composition is measured by determining the specific heat of a composition before and after its thermal transition. Thermal stability may also be evaluated by measuring or determining other parameters of thermodynamic stability including Gibbs free energy of unfolding (ΔG), enthalpy of unfolding (ΔH), or entropy of unfolding (ΔS). One or more of the above biochemical assays (e.g. a thermal challenge assay) are used to determine the temperature (i.e. the T_{C} value) at which 50% of the composition retains its activity (e.g. binding activity).

[0177] In addition, mutations to the scFv alter the thermal stability of the scFv compared with the unmutated scFv. When the mutated scFv is incorporated into a LRP6 construct, the mutated scFv confers thermal stability to the overall LRP6 construct. In one embodiment, the scFv comprises a single mutation that confers thermal stability to the scFv. In another embodiment, the scFv comprises multiple mutations that confer thermal stability to the scFv. In one embodiment, the multiple mutations in the scFv have an additive effect on thermal stability of the scFv.

[0178] b) % Aggregation

[0179] The stability of a composition can be determined by measuring its propensity to aggregate. Aggregation can be measured by a number of non-limiting biochemical or biophysical techniques. For example, the aggregation of a composition may be evaluated using chromatography, e.g. Size-Exclusion Chromatography (SEC). SEC separates molecules on the basis of size. A column is filled with semi-solid beads of a polymeric gel that will admit ions and small molecules into their interior but not large ones. When a protein composition is applied to the top of the column, the compact folded proteins (i.e. non-aggregated proteins) are distributed through a larger volume of solvent than is available to the large protein aggregates. Consequently, the large aggregates move more rapidly through the column, and in this way the mixture can be separated or fractionated into its components. Each fraction can be separately quantified (e.g. by light scattering) as it elutes from the gel. Accordingly, the % aggregation of a composition can be determined by comparing the concentration of a fraction with the total concentration of protein applied to the gel. Stable compositions elute from the column as essentially a single fraction and appear as essentially a single peak in the elution profile or chromatogram.

[0180] c) Binding Affinity

[0181] The stability of a composition can be assessed by determining its target binding affinity. A wide variety of methods for determining binding affinity are known in the art. An exemplary method for determining binding affinity employs surface plasmon resonance. Surface plasmon resonance is an optical phenomenon that allows for the analysis of real-time biospecific interactions by detection of alterations in protein concentrations within a biosensor matrix, for example using the BIAcore system (Pharmacia Biosensor AB, Uppsala, Sweden and Piscataway, N.J.). For further descriptions, see Jonsson, U., et al. (1993) Ann. Biol. Clin. 51:19-26; Jonsson, U., i (1991) Biotechniques 11:620-627; Johnsson, B., et al. (1995) J. Mol. Recognit. 8:125-131; and Johnnson, B., et al. (1991) Anal. Biochem. 198:268-277.

### Other Antibody Fragments

[0182] Other antibody fragments such as Fabs, scFabs, can also be used to generate the LRP6 constructs. Single chain antibodies can also be used in the LRP6 constructs such as a “disbud” which consists of two chains, each chain comprising a heavy chain variable region connected to a light chain variable region on the same polypeptide chain connected by a short peptide linker, wherein the two regions on the same chain do not pair with each other but with complementary domains on the other chain to form a bispecific molecule. Methods of preparing diabodies are known in the art (See, e.g., Holliger et al., (1993) Proc. Natl. Acad. Sci. USA 90:6444-6448, and Poljak et al., (1994) Structure 2:1121-1123).

[0183] Domain antibodies (dAbs) can be used in the LRP6 constructs are small functional binding fragments of antibodies, corresponding to the variable regions of either the heavy or light chains of antibodies. Domain antibodies are well expressed in bacterial, yeast, and mammalian cell systems. Further details of domain antibodies and methods of production thereof are known in the art (see, for example, U.S. Pat. Nos. 6,291,158; 6,582,915; 6,593,081; 6,172,197; 6,696,245; European Patents 0368684 & 0616640; WO05/035572, WO04/101790, WO04/081026, WO04/058821, WO04/003019 and WO03/002609. Nanobodies are derived from the heavy chains of an antibody.

[0184] A nanobody typically comprises a single variable domain and two constant domains (CH2 and CH3) and retains antigen-binding capacity of the original antibody. Nanobodies can be prepared by methods known in the art (See e.g., U.S. Pat. No. 6,765,087, U.S. Pat. No. 6,838,254, WO 06/079372). Unibodies consist of one light chain and one heavy chain of a IgG4 antibody. Unibodies may be made by the removal of the hinge region of IgG4 antibodies. Further details of unibodies and methods of preparing them may be found in WO2007/059782.

### Half-Life Extender Molecules

[0185] The present invention provides LRP6 conjugates comprising at least one LRP6 binding moiety and at least one half-life extender molecule such that the LRP6 construct binds to LRP6 and inhibits Wnt signaling without potentiation of the Wnt signal and displays an increased half-life in vitro and in vivo. The half-life extender molecule prolongs the therapeutic effect of the LRP6 construct in inhibiting a Wnt signal pathway. As such, the LRP6 constructs have desirable properties such as, an increased in vivo half-life of at least 5 hours, at least 10 hours, at least 15 hours, at least 20 hours, at least 25 hours, at least 30 hours, at least 35 hours, at least 40 hours, or more Several approaches can be taken to improve serum half-life of recombinant proteins, including PEGylation, glysosylation, fusion to antibody Fc domain, human serum albumin (HSA), polysialic acid (PSA), hydroxyethyl starch (HES), albumin-binding ligands, and carbohydrate shields; by genetic fusion to proteins binding to serum proteins, (e.g., HSA), IgG, FcRn, Fc, and transferrin; by coupling (genetically or chemically) to other LRP6 binding moieties that bind to serum proteins, such as nanobodies, Fabs, DARPins, avimers, affibodies, and anticalins; or by incorporation into nanocarriers, slow release formulations, or medical devices.

### (i) Human Serum Albumin

[0186] In one embodiment, the invention provides LRP6 constructs comprising at least two LRP6 binding moieties linked to human serum albumin (HSA). HSA, a protein of 585 amino acids in its mature form, is responsible for a significant proportion of the osmotic pressure of serum and also functions as a carrier of endogenous and exogenous ligands. The role of albumin as a carrier molecule and its inert nature are desirable properties for use as a carrier and transporter of polypeptides in vivo. The use of albumin as a component of an albumin fusion protein as a carrier for various proteins has been suggested in WO 93/15199, WO 93/15200, and EP 413 622. The use of N-terminal fragments of HSA for fusions to polypeptides has also been proposed (EP 399 666). Accordingly, by genetically or chemically fusing or conjugating the antibodies or fragments thereof to albumin, can stabilize or extend the shelf-life, and/or to retain the molecule's activity for extended periods of time in solution, in vitro and/or in vivo.

[0187] Fusion of albumin to another protein may be achieved by genetic manipulation, such that the DNA coding for HSA, or a fragment thereof, is joined to the DNA coding for the protein. A suitable host is then transformed or transfected with the fused nucleotide sequences, so arranged on a suitable plasmid as to express a fusion polypeptide. The expression may be effected in vitro from, for example, prokaryotic or eukaryotic cells, or in vivo e.g. from a transgenic organism. Additional methods pertaining to HSA fusions can be found, for example, in WO 2001077137 and WO 200306007, incorporated herein by reference. In a specific embodiment, the expression of the fusion protein is performed in mammalian cell lines, for example, CHO cell lines.

[0188] In one embodiment, the HSA is wild-type HSA with SEQ ID NO: 209.

[0189] dahksevahrfkdlgeenfkalyliafaqylqqcpfedhvklvnevtefaktcvadesaencdkslhtlfgdklctvatlretygema dccakqepernecflqhkddnpnlprlvrpevdvmctafhdneetflkkylyeiarrhpyfyapellffakrykaafteccqaadka acllpkldelrdegkassakqrlkcaslqkfgerafkawavarlsqrfpkaefaevsklvtdltkvhtecchgdllecaddradlakyi cenqdsissklkeccekpllekshciaevendempadlpslaadfveskdvcknyaeakdvflgmflyeyarrhpdysvvlllrla ktyettlekccaaadphecyakvyfdefkplveepqnlikqncelfeqlgeykfqnallvrytkkvpqvstptlvevsrnlgkvgskc ckhpeakrmpcaedylsvvlnqlcvlhektpvsdrvtkccteslvnrrpcfsalevdetyvpkefnaetftfhadictlsekerqikk qtalvelvkhkpkatkeqlkavmddfaafvekcckaddketcfaeegkklvaasqaalgl (SEQ ID NO: 209).

[0190] In another embodiment, the HSA is mutant HSA with SEQ ID NO: 210

[0191] Dahksevahrfkdlgeenfkalvliafaqylqqspfedhvklvnevtefaktcvadesaencdkslhtlfgdklctvatlretygem adccakqepernecflqhkddnpnlprlvrpevdvmctafhdneetflkkylyeiarrhpyfyapellffakrykaafteccqaadk aacllpkldelrdegkassakqrlkcaslqkfgerafkawavarlsqrfpkaefaevsklvtdltkvhtecchgdllecaddradlaky icenqdsissklkeccekpllekshciaevendempadlpslaadfveskdvcknyaeakdvflgmflyeyarrhpdysvvlllrl aktyettlekccaaadphecyakvfdefkplveepqnlikqncelfeqlgeykfqnallvrytkkvpqvstptlvevsrnlgkvgsk cckhpeakrmpcaedylsvvlnqlcvlhektpvsdrvtkccteslvnrrpcfsalevdetyvpkefqaetftfhadictlsekerqik kqtalvelvkhkpkatkeqlkavmddfaafvekcckaddketcfaeegkklvaasqaalgl (SEQ ID NO: 210).

[0192] The mutated HSA has two amino acid substitutions (i.e., the “C34S” and “N503Q” substitutions, as set forth in SEQ ID NO: 210) relative to wild-type HSA. This mutated HSA contains two amino acid substitutions (i.e., serine for cysteine at amino acid residue 34 (“C345”) and glutamine for asparagine at amino acid residue 503 (“N503Q”)). The cysteine residue at position 34 (i.e., C34) can be mutated to any amino acid residue other than cysteine (e.g., serine, threonine, or alanine). Likewise, the asparagine residue at position 503 (i.e., N503) can be mutated to any amino acid residue other than asparagine (e.g., glutamine, serine, histidine, or alanine). Specifically, the substitution of serine for cysteine at amino acid residue 34 results in reduced oxidation and protein heterogeneity of the HSA. In wild-type HSA, the asparagine at amino acid residue 503 is sensitive to deamination, likely resulting in reduced pharmacologic half-life. The substitution of glutamine for asparagine at amino acid residue 503 can result in increased pharmacologic half-life of the HSA, and correspondingly, of LRP6 construct that include the HSA when administered to a mammal (e.g., a human) or cells, tissues, or organs thereof.

[0193] The invention further provides an LRP6 conjugates that are formed using a truncated wild-type HSA polypeptide, linked to LRP6 binding moieties with or without attachment linkers. A wild-type HSA polypeptide lacking 1, 2, 3, 4, 5, 10, 15, 20, 50, 100, 200 or more amino acids of the full-length wild-type HSA amino acid sequence (i.e., SEQ ID NO: 209) can be linked to any of the LRP6 binding moieties described herein. Truncations can occur at one or both ends of the HSA, or can include a deletion of internal residues. Truncation of more than one amino acid residue need not be linear (i.e., consecutive). Examples of wild-type HSA include those having, in combination with one or more attachment linkers or LRP6 binding moieties, one or more of domain I (“DI” residues 1-197 of SEQ ID NO:209) of HSA, domain II (“DII” residues 189-385 of SEQ ID NO: 209) of HSA, or domain III (“DIII” residues 381-585 of SEQ ID NO: 209) of HSA, or combinations thereof, e.g., domains I and II, I and III, and II and III of HSA. Serum clearance rates of the LRP6 conjugate can be optimized by testing conjugates containing a truncated wild-type HSA.

[0194] The half-life extender (e.g., HSA) may, but need not, be modified by site-specific chemical modification of amino acid residues in the HSA. The correctly-folded tertiary structure of HSA displays certain amino acid residues on the external face of the protein. Chemically-reactive amino acid residues (e.g., cysteine) can be substituted for these surface-exposed residues to allow site-specific conjugation of other agent.

[0195] Alternatively, or in addition, half-life extender (e.g., HSA) may optionally be modified by the addition or removal of asparagine, serine, or threonine residues from an HSA sequence to alter glycosylation of these amino acid residues. Glycosylation sites added to an HSA can be surface-exposed. Glycosyl or other carbohydrate moieties introduced to an HSA can be directly conjugated to diagnostic, therapeutic, or cytotoxic agents.

[0196] Surface-exposed amino acid residues of the half-life extender (e.g., HSA) may be substituted with cysteine residues to allow for chemical conjugation of diagnostic, therapeutic, or cytotoxic agents. Cysteine residues exposed on the surface of the HSA (when folded into its native tertiary structure) allow the specific conjugation of a diagnostic, therapeutic, or cytotoxic agent to a thiol reactive group such as maleimide or haloacetyl. The nucleophilic reactivity of the thiol functionality of a cysteine residue to a maleimide group is about 1000 times higher compared to any other amino acid functionality in a protein, such as the amino group of a lysine residue or the N-terminal amino group. Thiol specific functionality in iodoacetyl and maleimide reagents may react with amine groups, but higher pH (>9.0) and longer reaction times are required (Garman, 1997, Non-Radioactive Labelling: A Practical Approach, Academic Press, London). The amount of free thiol in a protein may be estimated using the standard Ellman's assay. In some instances, reduction of the disulfide bonds with a reagent such as dithiothreitol (DTT) or selenol (Singh et al, Anal. Biochem. 304:147-156 (2002)) is required to generate the reactive free thiol.

[0197] Sites for cysteine substitution can be identified by analysis of surface accessibility of the HSA. The surface accessibility can be expressed as the surface area (e.g., square angstroms) that can be contacted by a solvent molecule, e.g., water. The occupied space of water is approximated as a sphere with a 1.4 angstrom radius. Software for calculating the surface accessibility of each amino acid of a protein is freely available or licensable. For example, the CCP4 Suite of crystallography programs which employ algorithms to calculate the surface accessibility of each amino acid of a protein with known x-ray crystallography derived coordinates (“The CCP4 Suite: Programs for Protein Crystallography” Acta. Cryst. D50:760-763 (1994); www.ccp4.ac.uk/dist/html/INDEX.html). Solvent accessibility may also be assessed using the free software DeepView Swiss PDB Viewer downloaded from the Swiss Institute of Bioinformatics. The substitution of cysteines at surface-exposed sites allows for conjugation of the reactive cysteine to a thiol reactive group linked to the diagnostic or therapeutic agent. Glycosylation

[0198] In addition, altered serum clearance rates can be achieved by engineering glycosylation sites into the half-life extender (e.g., HSA). In certain embodiments, an HSA can be glycosylated. Glycosylation of polypeptides is typically either N-linked or O-linked. N-linked refers to the attachment of a carbohydrate moiety to the side chain of an asparagine residue. The tripeptide sequences asparagine-X-serine and asparagine-X-threonine, where X represents any amino acid except proline, are the recognition sequences for enzymatic attachment of the carbohydrate moiety to the asparagine side chain. Thus, the presence of either of these tripeptide sequences in a polypeptide creates a potential glycosylation site. O-linked glycosylation refers to the attachment of one of the sugars N-aceylgalactosamine, galactose, or xylose to a hydroxyamino acid, most commonly serine or threonine, although 5-hydroxyproline or 5-hydroxylysine may also be used.

[0199] Addition or deletion of glycosylation sites to the HSA is conveniently accomplished by altering the amino acid sequence such that one or more of the above-described tripeptide sequences (for N-linked glycosylation sites) is created. The alteration may also be made by the addition, deletion, or substitution of one or more serine or threonine residues to the sequence of the HSA (for O-linked glycosylation sites). The resulting carbohydrate structures on HSA can also be used for site-specific conjugation of cytotoxic, immunomodulatory or cytostatic agents.

[0200] The half-life extender molecules such as HSA, can be incorporated into the LRP6 conjugate by direct or indirect linking with LRP6 binding moieties, e.g., scFv. The term “direct” linking refers to LRP6 binding moieties that are immediately bound to the half-life extender such that there is no gap between the LRP6 binding moiety and the half-life extender. The term “indirect” linking refers to LRP6 binding moieties that are not immediately bound to the half-life extender, but rather through an amino acid “attachment linker” between the LRP6 binding moiety and the half-life extender molecule. Examples of amino attachment linkers include, but are not limited to linkers comprising entirely of glycine, alanine, serine, glutamine, leucine, or valine residues linkers, or any combination of these residues. These amino acid attachment linkers can be 2, 3, 4, 5, 6, 7, 8, 9, 10, 11, 12, 13, 14, 15, 16, 17, 18, 19, 20 or more amino acids in length and provide a flexible tether between the LRP6 binding moiety and the half-life extender. The amino acid attachment linkers that can be attached (e.g., covalently (e.g., a peptidic bond), ionically, or hydrophobically bonded, or via a high-affinity protein-protein binding interaction (e.g., biotin and avidin)) to the C- or N-termini of a half-life extender such as HSA or mutated HSA.

### (ii) Fc Fusions

[0201] This invention provides LRP6 constructs comprising at least one LRP6 binding moiety and at least one half-life extender molecule that is an Fc molecule. Native antibody molecule consists of two identical heavy chains, and two identical light chains. The heavy chain constant region includes CH1, the hinge region, CH2, and CH3. Papain digestion of antibodies produces two fragments, Fab and Fc. The Fc fragment consists of CH2, CH3, and part of the hinge region. It has been recognized that the Fc region is critical for maintaining the serum half-life of an antibody of class IgG (Ward and Ghetie, Ther. Immunol. 2:77-94 (1995)). Studies have found that the serum half-life of an IgG antibody is mediated by binding of Fc to the neonatal Fc receptor (FcRn). FcRn is a heterodimer consisting of a transmembrane a chain and a soluble β chain (β2-microglobulin). Advances in molecular biology techniques have allowed the preparation of novel chimeric polypeptides with multiple functional domains. The most common of such chimeric polypeptides are immunoglobulin (Ig) fusion proteins. These proteins consist of the Fc regions of antibodies, typically mouse or human antibodies, fused to an unrelated protein or protein fragment.

[0202] The term “Fc” as used herein refers to a polypeptide comprising the CH3, CH2 and at least a portion of the hinge region of a constant domain of an antibody. Optionally, an Fc region may include a CH4 domain, present in some antibody classes. An Fc may comprise the entire hinge region of a constant domain of an antibody. In one embodiment, the invention comprises an Fc and a CH1 region of an antibody. In one embodiment, the invention comprises an Fc and CH3 region of an antibody. In another embodiment, the invention comprises an Fc, a CH1 region and a Ckappa/lambda region from the constant domain of an antibody. Exemplary modifications include additions, deletions or substitutions of one or more amino acids in one or more domains. Such changes may be included to optimize effector function, half-life, etc.

[0203] LRP6 conjugates comprising Fc as a half-life extender may be produced by standard recombinant DNA techniques or by protein synthetic techniques, e.g., by use of a peptide synthesizer. For example, a nucleic acid molecule encoding a Fc fusion protein can be synthesized by conventional techniques including automated DNA synthesizers. Alternatively, PCR amplification of gene fragments can be carried out using anchor primers which give rise to complementary overhangs between two consecutive gene fragments which can subsequently be annealed and reamplified to generate a chimeric gene sequence (see, e.g., “Current Protocols in Molecular Biology”, Ausubel et al., eds., John Wiley & Sons, (1992)). Moreover, a nucleic acid encoding a bioactive molecule can be cloned into an expression vector containing the Fc domain or a fragment thereof such that the bioactive molecule is linked in-frame to the constant domain or fragment thereof.

[0204] Methods for fusing or conjugating polypeptides to the constant regions of antibodies are shown in the Examples section and are known in the art. See, e.g., U.S. Pat. Nos. 5,336,603, 5,622,929, 5,359,046, 5,349,053, 5,447,851, 5,723,125, 5,783,181, 5,908,626, 5,844,095, and 5,112,946; European Patent publications, EP 0 307 434; EP 0 367 166; EP 0 394 827; PCT publications WO 91/06570, WO 96/04388, WO 96/22024, WO 97/34631, and WO 99/04813; Ashkenazi et al., Proc. Natl. Acad. Sci. USA 88:10535-10539 (1991); Traunecker et al., Nature 331:84-86 (1988); Zheng et al., J. Immunol. 154:5590-5600 (1995); and Vil et al., Proc. Natl. Acad. Sci. USA 89:11337-11341 (1992), WO 98/23289; WO 97/34631; U.S. Pat. No. 6,277,375; WO 93/15199, WO 93/15200; WO 01/77137; and EP 413,622 each of which is incorporated herein by reference in its entirety. An LRP6 construct comprising a modified Fc as a half life extender is also within the scope of the invention.

(iii) PEGylation

[0205] In another embodiment, the LRP6 constructs comprise at least one half-life extender molecule that is a polyethylene glycol (PEG). To prolong the serum circulation of LRP6 conjugates in vivo, the LRP6 binding moieties can be linked to inert polymer molecules such as high molecular weight PEG with or without an attachment linker either through site-specific conjugation of the PEG to the N- or C-terminus of the LRP6 binding moiety or via epsilon-amino groups present on lysine residues. To PEGylate, an LRP6 binding moiety is typically reacted with polyethylene glycol (PEG), such as a reactive ester or aldehyde derivative of PEG, under conditions in which one or more PEG groups become attached to the LRP6 binding moiety. The PEGylation can be carried out by an acylation reaction or an alkylation reaction with a reactive PEG molecule (or an analogous reactive water-soluble polymer). As used herein, the term “polyethylene glycol” is intended to encompass any of the forms of PEG that have been used to derivatize other proteins, such as mono (C1-C10) alkoxy- or aryloxy-polyethylene glycol or polyethylene glycol-maleimide. Linear or branched polymer derivatization that results in minimal loss of biological activity can be used. The degree of conjugation can be closely monitored by SDS-PAGE and mass spectrometry to ensure proper conjugation of PEG molecules to the LRP6 binding moieties resulting in LRP6 conjugates. Unreacted PEG can be separated from LRP6 conjugates by size-exclusion or by ion-exchange chromatography. LRP6 conjugates can be tested for binding activity as well as for in vivo efficacy using methods well-known to those of skill in the art, for example, by immunoassays described herein. Methods for pegylating proteins are known in the art (See for example, EP 0 154 316 by Nishimura et al. and EP 0 401 384 by Ishikawa et al.).

[0206] Other modified pegylation technologies include reconstituting chemically orthogonal directed engineering technology (ReCODE PEG), which incorporates chemically specified side chains into biosynthetic proteins via a reconstituted system that includes tRNA synthetase and tRNA. This technology enables incorporation of more than 30 new amino acids into biosynthetic proteins in E. coli, yeast, and mammalian cells. The tRNA incorporates a normative amino acid any place an amber codon is positioned, converting the amber from a stop codon to one that signals incorporation of the chemically specified amino acid.

[0207] Recombinant pegylation technology (rPEG) can also be used for serum half-life extension. This technology involves genetically fusing a 300-600 amino acid unstructured protein tail to the LRP6 binding moiety. Because the apparent molecular weight of such an unstructured protein chain is about 15-fold larger than its actual molecular weight, the serum half-life of the LRP6 binding moiety will be greatly increased. In contrast to traditional PEGylation, which requires chemical conjugation and repurification, the manufacturing process is greatly simplified and the product is homogeneous.

### (iv) PSA

[0208] In another embodiment, the LRP6 constructs comprise at least one half-life extender molecule that is polysialic acid (PSA). In Polysialytion is another technology, which uses the natural polymer PSA to prolong the active life and improve the stability of therapeutic peptides and proteins. PSA is a polymer of sialic acid (a sugar). When used for protein and therapeutic peptide drug delivery, polysialic acid provides a protective microenvironment on conjugation. This increases the active life of the LRP6 conjugate in the circulation and prevents it from being recognized by the immune system. The PSA polymer is naturally found in the human body. It was adopted by certain bacteria which evolved over millions of years to coat their walls with it. These naturally polysialylated bacteria were then able, by virtue of molecular mimicry, to foil the body's defense system. PSA, nature's ultimate stealth technology, can be easily produced from such bacteria in large quantities and with predetermined physical characteristics. Bacterial PSA is completely non-immunogenic, even when coupled to proteins, as it is chemically identical to PSA in the human body.

### (v) HESylation

[0209] In another embodiment, the LRP6 constructs comprise at least one half-life extender molecule that is hydroxyethyl starch (“HES”). The use of HES derivatives linked to LRP6 binding moieties can result in an LRP6 conjugate with an extended half-life. HES is a modified natural polymer derived from waxy maize starch and can be metabolized by the body's enzymes. HES solutions are usually administered to substitute deficient blood volume and to improve the rheological properties of the blood. Hesylation of an LRP6 binding moiety enables the prolongation of the circulation half-life by increasing the stability of the molecule, as well as by reducing renal clearance, resulting in an increased biological activity. By varying different parameters, such as the molecular weight of HES, a wide range of HES LRP6 conjugates can be customized.

### LRP6 Constructs

[0210] The present invention provides LRP6 conjugates comprising at least one LRP6 binding moiety and at least one half-life extender molecule such that the LRP6 construct binds to LRP6 and inhibits Wnt signaling with no significant potentiation of the Wnt signal and displays an increased half-life in vitro and in vivo. The half-life extender molecule prolongs the therapeutic effect of the LRP6 construct in inhibiting a Wnt signal pathway. As such, the LRP6 constructs have desirable properties such as, an increased in vivo half-life of at least 5 hours. The present invention is based on the discovery that the LRP6 constructs have the ability to inhibit both propeller 1 (e.g. Wnt1 and propeller 3 (e.g. Wnt3) ligand-mediated signaling and avoid potentiation of a Wnt signal. The LRP6 binding moieties of the LRP6 construct are designed to bind to distinct LRP6 β-propeller regions. At least one LRP6 binding moiety of the LRP6 construct comprises a Propeller 1 antibody or fragment thereof that binds to the β-propeller 1 domain and blocks propeller 1-dependent Wnts such as Wnt1, Wnt2, Wnt6, Wnt7A, Wnt7B, Wnt9, Wnt10A, Wnt10B to inhibit a Wnt 1 signal transduction pathway; and at least one LRP6 binding moiety of the LRP6 construct comprises a Propeller 3 antibody or fragment thereof that binds to the β-propeller 3 domain and blocks propeller 3-dependent Wnts such as Wnt3a and Wnt3 to inhibit a Wnt3 signal transduction pathway. In addition to the multiple binding effect of the LRP6 construct, the half-life of the LRP6 construct is also increased due to the half-life extender molecule. The half-life is increased by at least about 5 hours, at least 10 hours, at least 15 hours, at least 20 hours, at least 25 hours, at least 30 hours, at least 35 hours, at least 40 hours, or more, at least 10 hours, at least 15 hours, at least 20 hours, at least 25 hours, at least 30 hours, at least 35 hours, at least 40 hours, or more.

[0211] The LRP6 binding moiety includes, but is not limited to antibodies (e.g., monoclonal, polyclonal, recombinant, humanized, and chimeric antibodies), antibody fragments (e.g., scFvs, scFabs, Fab fragments, Fab′₂, SMIP, domain antibodies, diabodies, minibodies, scFv-Fc, affibodies, nanobodies, and domain antibodies), receptors, ligands, aptamers, and other molecules having a known binding partner. In one embodiment, the LRP6 construct is generated using at least two scFvs as LRP6 binding moieties. In one embodiment, the LRP6 construct is generated using at least one Fab as an LRP6 binding moiety. In one embodiment, the LRP6 construct is generated using at least one scFab as a LRP6 binding moiety. In one embodiment, the LRP6 construct is generated using any combination of LRP6 binding moieties. Representative examples of LRP6 constructs are shown in Table 2.

TABLE 2
Examples of LRP6 constructs

| SEQ ID | | |
|---|---|---|
| NUMBER | Construct | Sequence |
| anti- | | |
| LRP6_MOR08168 Fab- | | |
| MSA | | |
| SEQ ID NO: 211 | 8168-VL/CL | DIELTQPPSVSVAPGQTARISCSGDSLRNKVYWYQQKPGQAPVLVIYKNNRPSGIPERFSGSNSGNTATLTISGTQA |
| | | EDEADYYCQSYDGQKSLVFGGGTKLTVLGQPKAAPSVTLFPPSSEELQANKATLVCLISDFYPGAVTVAWKADSSP |
| | | VKAGVETTTPSKQSNNKYAASSYLSLTPEQWKSHRSYSCQVTHEGSTVEKTVAPTECS |
| SEQ ID NO: 212 | 8168-VL/CL- | GATATCGAACTGACCCAGCCGCCTTCAGTGAGCGTTGCACCAGGTCAGACCGCGCGTATCTCGTGTAGCGGC |
| | DNA | GATTCTCTTCGTAATAAGGTTTATTGGTACCAGCAGAAACCCGGGCAGGCGCCAGTTCTTGTGATTTATAAGA |
| | | ATAATCGTCCCTCAGGCATCCCGGAACGCTTTAGCGGATCCAACAGCGGCAACACCGCGACCCTGACCATTAG |
| | | CGGCACTCAGGCGGAAGACGAAGCGGATTATTATTGCCAGTCTTATGATGGTCAGAAGTCTCTTGTGTTTGGC |
| | | GGCGGCACGAAGCTTACCGTGCTGGGCCAGCCCAAAGCCGCCCCTAGCGTGACCCTGTTCCCCCCCAGCAGC |
| | | GAGGAACTGCAGGCCAACAAGGCCACCCTGGTCTGCCTGATCAGCGACTTCTACCCTGGCGCCGTGACCGTG |
| | | GCCTGGAAGGCCGACAGCAGCCCCGTGAAGGCCGGCGTGGAGACAACCACCCCCAGCAAGCAGAGCAACAA |
| | | CAAGTACGCCGCCAGCAGCTACCTGAGCCTGACCCCCGAGCAGTGGAAGAGCCACAGAAGCTACAGCTGCCA |
| | | GGTCACCCACGAGGGCAGCACCGTGGAGAAAACCGTGGCCCCCACCGAGTGCAGC |
| SEQ ID NO: 213 | 8168-VH/CH1- | QVQLVESGGGLVQPGGSLRLSCAASGFTFSDYVINWVRQAPGKGLEWVSGISWSGVNTHYADSVKGRFTISRDN |
| | MSA | SKNTLYLQMNSLRAEDTAVYYCARLGATANNIRYKFMDVWGQGTLVTVSSASTKGPSVFPLAPSSKSTSGGTAAL |
| | | GCLVKDYFPEPVTVSWNSGALTSGVHTFPAVLQSSGLYSLSSVVTVPSSSLGTQTYICNVNHKPSNTKVDKKVEPKS |
| | | CDKTHTEAHKSEIAHRYNDLGEQHFKGLVLIAFSQYLQKCSYDEHAKLVQEVTDFAKTCVADESAANCDKSLHTLFG |
| | | DKLCAIPNLRENYGELADCCTKQEPERNECFLQHKDDNPSLPPFERPEAEAMCTSFKENPTTFMGHYLHEVARRHP |
| | | YFYAPELLYYAEQYNEILTQCCAEADKESCLTPKLDGVKEKALVSSVRQRMKCSSMQKFGERAFKAWAVARLSQTF |
| | | PNADFAEITKLATDLTKVNKECCHGDLLECADDRAELAKYMCENQATISSKLQTCCDKPLLKKAHCLSEVEHDTMP |
| | | ADLPAIAADFVEDQEVCKNYAEAKDVFLGTFLYEYSRRHPDYSVSLLLRLAKKYEATLEKCCAEANPPACYGTVLAEF |
| | | QPLVEEPKNLVKTNCDLYEKLGEYGFQNAILVRYTQKAPQVSTPTLVEAARNLGRVGTKCCTLPEDQRLPCVEDYLS |
| | | AILNRVCLLHEKTPVSEHVTKCCSGSLVERRPCFSALTVDETYVPKEFKAETFTFHSDICTLPEKEKQIKKQTALAELVK |
| | | HKPKATAEQLKTVMDDFAQFLDTCCKAADKDTCFSTEGPNLVTRCKDALAHHHHHH |
| SEQ ID NO: 214 | 8168-VH/CH1- | CAGGTGCAATTGGTGGAAAGCGGCGGCGGCCTGGTGCAACCGGGCGGCAGCCTGCGTCTGAGCTGCGCGGC |
| | MSA-DNA | CTCCGGATTTACCTTTTCTGATTATGTTATTAATTGGGTGCGCCAAGCCCCTGGGAAGGGTCTCGAGTGGGTG |
| | | AGCGGTATTTCTTGGTCTGGTGTTAATACTCATTATGCTGATTCTGTTAAGGGTCGTTTTACCATTTCACGTGAT |
| | | AATTCGAAAAACACCCTGTATCTGCAAATGAACAGCCTGCGTGCGGAAGATACGGCCGTGTATTATTGCGCGC |
| | | GTCTTGGTGCTACTGCTAATAATATTCGTTATAAGTTTATGGATGTTTGGGGCCAAGGCACCCTGGTGACGGT |
| | | TAGCTCAGCTAGCACCAAGGGCCCCAGCGTGTTCCCCCTGGCCCCCAGCAGCAAGAGCACCTCTGGCGGCAC |
| | | TGCTGCCCTGGGCTGCCTGGTCAAGGACTACTTCCCCGAGCCCGTGACAGTGTCCTGGAACAGCGGAGCCCT |
| | | GACCTCCGGCGTGCACACCTTCCCCGCCGTGCTGCAGAGCAGCGGCCTGTACAGCCTGAGCAGCGTGGTCAC |
| | | AGTGCCCAGCAGCAGCCTGGGCACCCAGACCTACATCTGCAACGTGAACCACAAGCCCAGCAACACCAAGGT |
| | | CGACAAGAAGGTGGAGCCCAAGAGCTGCGACAAGACCCACACCGAGGCCCACAAGAGCGAGATCGCCCACC |
| | | GGTACAACGACCTGGGAGAGCAGCATTTCAAGGGACTGGTGCTGATCGCCTTCAGCCAGTACCTGCAGAAGT |
| | | GCAGCTACGACGAGCACGCCAAGCTGGTGCAGGAAGTGACCGACTTCGCCAAGACCTGCGTGGCCGACGAG |
| | | AGCGCCGCCAACTGCGACAAGAGCCTGCACACCCTGTTCGGCGACAAGCTGTGCGCCATCCCCAACCTGCGG |
| | | GAGAACTACGGCGAGCTGGCCGACTGCTGCACCAAGCAGGAACCCGAGCGGAACGAGTGCTTCCTGCAGCA |
| | | CAAGGACGACAACCCCAGCCTGCCCCCCTTCGAGAGGCCTGAGGCCGAGGCCATGTGCACCAGCTTCAAAGA |
| | | GAACCCCACCACCTTCATGGGCCACTACCTGCACGAGGTGGCCAGGCGGCACCCCTACTTCTACGCCCCCGAG |
| | | CTGCTGTACTACGCCGAGCAGTACAACGAGATCCTGACCCAGTGCTGCGCCGAGGCCGACAAAGAGAGCTGC |
| | | CTGACCCCCAAGCTGGACGGCGTGAAAGAAAAGGCCCTGGTGTCCAGCGTGCGGCAGCGGATGAAGTGCAG |
| | | CAGCATGCAGAAGTTCGGCGAGCGGGCCTTCAAGGCCTGGGCCGTGGCCCGGCTGTCCCAGACCTTCCCCAA |
| | | CGCCGATTTCGCCGAGATCACCAAGCTGGCCACCGACCTGACCAAGGTGAACAAAGAGTGCTGTCACGGCGA |
| | | CCTGCTGGAATGCGCCGACGACCGGGCCGAGCTGGCCAAGTACATGTGCGAGAACCAGGCCACCATCAGCTC |
| | | CAAACTGCAGACCTGCTGTGATAAGCCCCTGCTGAAGAAGGCCCACTGCCTGAGCGAGGTGGAGCACGACAC |
| | | CATGCCCGCCGACCTGCCCGCCATTGCCGCCGACTTCGTGGAGGACCAGGAAGTGTGCAAGAATTACGCCGA |
| | | GGCCAAGGACGTGTTCCTGGGCACCTTCCTGTACGAGTACAGCAGACGGCACCCCGACTACAGCGTGAGCCT |
| | | GCTGCTGAGGCTGGCCAAGAAGTACGAGGCCACCCTGGAAAAGTGTTGCGCCGAAGCCAACCCCCCTGCCTG |
| | | CTACGGCACCGTGCTGGCCGAGTTCCAGCCCCTGGTGGAGGAACCCAAGAACCTGGTGAAAACCAACTGCGA |
| | | TCTGTACGAGAAGCTGGGCGAGTACGGCTTCCAGAACGCCATCCTGGTCCGGTACACCCAGAAAGCCCCCCA |
| | | GGTGTCCACCCCCACACTGGTGGAGGCCGCCAGGAACCTGGGCAGAGTCGGCACCAAGTGCTGCACCCTGCC |
| | | CGAGGATCAGAGGCTGCCCTGTGTCGAGGACTACCTGAGCGCCATCCTGAACAGAGTGTGCCTGCTGCACGA |
| | | GAAAACCCCCGTGAGCGAGCACGTGACCAAGTGTTGCAGCGGCAGCCTGGTGGAGCGGAGGCCCTGCTTCA |
| | | GCGCCCTGACCGTGGACGAGACATACGTGCCCAAAGAGTTCAAGGCCGAGACATTCACCTTCCACAGCGACA |
| | | TCTGTACCCTGCCTGAGAAAGAGAAGCAGATCAAGAAGCAGACCGCCCTGGCCGAACTGGTGAAGCACAAG |
| | | CCCAAGGCCACCGCCGAGCAGCTGAAAACCGTGATGGACGACTTCGCCCAGTTCCTGGACACCTGCTGCAAG |
| | | GCCGCCGACAAGGACACCTGTTTCAGCACCGAGGGCCCCAACCTGGTGACCCGGTGCAAGGACGCCCTGGCC |
| | | CACCATCATCACCATCAC |
| anti- | | |
| LRP6_MOR08168 | | |
| Fab- | | |
| MSA (C:S) | | |
| SEQ ID NO: 215 | 8168-VL/CL | DIELTQPPSVSVAPGQTARISCSGDSLRNKVYWYQQKPGQAPVLVIYKNNRPSGIPERFSGSNSGNTATLTISGTQA |
| | | EDEADYYCQSYDGQKSLVFGGGTKLTVLGQPKAAPSVTLFPPSSEELQANKATLVCLISDFYPGAVTVAWKADSSP |
| | | VKAGVETTTPSKQSNNKYAASSYLSLTPEQWKSHRSYSCQVTHEGSTVEKTVAPTECS |
| SEQ ID NO: 216 | 8168-VL/CL- | GACATCGAGCTGACCCAGCCCCCTTCTGTGTCTGTGGCCCCTGGCCAGACCGCCAGAATCAGCTGCAGCGGC |
| | DNA | GACAGCCTGCGGAACAAGGTGTACTGGTATCAGCAGAAGCCCGGCCAGGCTCCCGTGCTGGTGATCTACAAG |
| | | AACAACCGGCCCAGCGGCATCCCTGAGCGGTTCAGCGGCAGCAACAGCGGCAATACCGCCACCCTGACCATC |
| | | AGCGGCACCCAGGCCGAAGATGAGGCCGACTACTACTGCCAGAGCTACGACGGCCAGAAAAGCCTGGTGTT |
| | | CGGCGGAGGCACCAAGCTTACCGTGCTGGGCCAGCCCAAAGCCGCCCCTAGCGTGACCCTGTTCCCCCCCAG |
| | | CAGCGAGGAACTGCAGGCCAACAAGGCCACCCTGGTCTGCCTGATCAGCGACTTCTACCCTGGCGCCGTGAC |
| | | CGTGGCCTGGAAGGCCGACAGCAGCCCCGTGAAGGCCGGCGTGGAGACAACCACCCCCAGCAAGCAGAGCA |
| | | ACAACAAGTACGCCGCCAGCAGCTACCTGAGCCTGACCCCCGAGCAGTGGAAGAGCCACAGAAGCTACAGCT |
| | | GCCAGGTCACCCACGAGGGCAGCACCGTGGAGAAAACCGTGGCCCCCACCGAGTGCAGC |
| SEQ ID NO: 217 | 8168-VH/CH1- | QVQLVESGGGLVQPGGSLRLSCAASGFTFSDYVINWVRQAPGKGLEWVSGISWSGVNTHYADSVKGRFTISRDN |
| | MSA (C:S) | SKNTLYLQMNSLRAEDTAVYYCARLGATANNIRYKFMDVWGQGTLVTVSSASTKGPSVFPLAPSSKSTSGGTAAL |
| | | GCLVKDYFPEPVTVSWNSGALTSGVHTFPAVLQSSGLYSLSSVVTVPSSSLGTQTYICNVNHKPSNTKVDKKVEPKS |
| | | CDKTHTEAHKSEIAHRYNDLGEQHFKGLVLIAFSQYLQKSSYDEHAKLVQEVTDFAKTCVADESAANCDKSLHTLFG |
| | | DKLCAIPNLRENYGELADCCTKQEPERNECFLQHKDDNPSLPPFERPEAEAMCTSFKENPTTFMGHYLHEVARRHP |
| | | YFYAPELLYYAEQYNEILTQCCAEADKESCLTPKLDGVKEKALVSSVRQRMKCSSMQKFGERAFKAWAVARLSQTF |
| | | PNADFAEITKLATDLTKVNKECCHGDLLECADDRAELAKYMCENQATISSKLQTCCDKPLLKKAHCLSEVEHDTMP |
| | | ADLPAIAADFVEDQEVCKNYAEAKDVFLGTFLYEYSRRHPDYSVSLLLRLAKKYEATLEKCCAEANPPACYGTVLAEF |
| | | QPLVEEPKNLVKTNCDLYEKLGEYGFQNAILVRYTQKAPQVSTPTLVEAARNLGRVGTKCCTLPEDQRLPCVEDYLS |
| | | AILNRVCLLHEKTPVSEHVTKCCSGSLVERRPCFSALTVDETYVPKEFKAETFTFHSDICTLPEKEKQIKKQTALAELVK |
| | | HKPKATAEQLKTVMDDFAQFLDTCCKAADKDTCFSTEGPNLVTRSKDALAHHHHHH |
| SEQ ID NO: 218 | 8168-VH/CH1- | CAGGTGCAATTGGTCGAGTCTGGCGGAGGACTGGTGCAGCCTGGTGGCAGCCTGAGACTGAGCTGCGCCGC |
| | MSA-(C:S)-DNA | CAGCGGCTTCACCTTCAGCGACTACGTGATCAACTGGGTGCGACAGGCCCCTGGAAAGGGCCTGGAATGGGT |
| | | GTCCGGCATCTCTTGGTCTGGCGTGAACACCCACTACGCCGACAGCGTGAAGGGCCGGTTCACCATCAGCCG |
| | | GGACAACAGCAAGAACACCCTGTACCTGCAGATGAACAGCCTGAGAGCCGAGGACACCGCCGTGTACTACTG |
| | | TGCCAGACTGGGCGCCACCGCCAACAACATCCGGTACAAGTTCATGGACGTGTGGGGCCAGGGCACACTGGT |
| | | GACCGTCAGCTCAGCTAGCACCAAGGGCCCCAGCGTGTTCCCCCTGGCCCCCAGCAGCAAGAGCACCTCTGG |
| | | CGGCACTGCTGCCCTGGGCTGCCTGGTCAAGGACTACTTCCCCGAGCCCGTGACAGTGTCCTGGAACAGCGG |
| | | AGCCCTGACCTCCGGCGTGCACACCTTCCCCGCCGTGCTGCAGAGCAGCGGCCTGTACAGCCTGAGCAGCGT |
| | | GGTCACAGTGCCCAGCAGCAGCCTGGGCACCCAGACCTACATCTGCAACGTGAACCACAAGCCCAGCAACAC |
| | | CAAGGTCGACAAGAAGGTGGAGCCCAAGAGCTGCGACAAGACCCACACCGAGGCCCACAAGAGCGAGATCG |
| | | CCCACCGGTACAACGACCTGGGAGAGCAGCATTTCAAGGGACTGGTGCTGATCGCCTTCAGCCAGTACCTGC |
| | | AGAAGTCCAGCTACGACGAGCACGCCAAGCTGGTGCAGGAAGTGACCGACTTCGCCAAGACCTGCGTGGCC |
| | | GACGAGAGCGCCGCCAACTGCGACAAGAGCCTGCACACCCTGTTCGGCGACAAGCTGTGCGCCATCCCCAAC |
| | | CTGCGGGAGAACTACGGCGAGCTGGCCGACTGCTGCACCAAGCAGGAACCCGAGCGGAACGAGTGCTTCCT |
| | | GCAGCACAAGGACGACAACCCCAGCCTGCCCCCCTTCGAGAGGCCTGAGGCCGAGGCCATGTGCACCAGCTT |
| | | CAAAGAGAACCCCACCACCTTCATGGGCCACTACCTGCACGAGGTGGCCAGGCGGCACCCCTACTTCTACGCC |
| | | CCCGAGCTGCTGTACTACGCCGAGCAGTACAACGAGATCCTGACCCAGTGCTGCGCCGAGGCCGACAAAGAG |
| | | AGCTGCCTGACCCCCAAGCTGGACGGCGTGAAAGAAAAGGCCCTGGTGTCCAGCGTGCGGCAGCGGATGAA |
| | | GTGCAGCAGCATGCAGAAGTTCGGCGAGCGGGCCTTCAAGGCCTGGGCCGTGGCCCGGCTGTCCCAGACCTT |
| | | CCCCAACGCCGATTTCGCCGAGATCACCAAGCTGGCCACCGACCTGACCAAGGTGAACAAAGAGTGCTGTCA |
| | | CGGCGACCTGCTGGAATGCGCCGACGACCGGGCCGAGCTGGCCAAGTACATGTGCGAGAACCAGGCCACCA |
| | | TCAGCTCCAAACTGCAGACCTGCTGTGATAAGCCCCTGCTGAAGAAGGCCCACTGCCTGAGCGAGGTGGAGC |
| | | ACGACACCATGCCCGCCGACCTGCCCGCCATTGCCGCCGACTTCGTGGAGGACCAGGAAGTGTGCAAGAATT |
| | | ACGCCGAGGCCAAGGACGTGTTCCTGGGCACCTTCCTGTACGAGTACAGCAGACGGCACCCCGACTACAGCG |
| | | TGAGCCTGCTGCTGAGGCTGGCCAAGAAGTACGAGGCCACCCTGGAAAAGTGTTGCGCCGAAGCCAACCCCC |
| | | CTGCCTGCTACGGCACCGTGCTGGCCGAGTTCCAGCCCCTGGTGGAGGAACCCAAGAACCTGGTGAAAACCA |
| | | ACTGCGATCTGTACGAGAAGCTGGGCGAGTACGGCTTCCAGAACGCCATCCTGGTCCGGTACACCCAGAAAG |
| | | CCCCCCAGGTGTCCACCCCCACACTGGTGGAGGCCGCCAGGAACCTGGGCAGAGTCGGCACCAAGTGCTGCA |
| | | CCCTGCCCGAGGATCAGAGGCTGCCCTGTGTCGAGGACTACCTGAGCGCCATCCTGAACAGAGTGTGCCTGC |
| | | TGCACGAGAAAACCCCCGTGAGCGAGCACGTGACCAAGTGTTGCAGCGGCAGCCTGGTGGAGCGGAGGCCC |
| | | TGCTTCAGCGCCCTGACCGTGGACGAGACATACGTGCCCAAAGAGTTCAAGGCCGAGACATTCACCTTCCACA |
| | | GCGACATCTGTACCCTGCCTGAGAAAGAGAAGCAGATCAAGAAGCAGACCGCCCTGGCCGAACTGGTGAAG |
| | | CACAAGCCCAAGGCCACCGCCGAGCAGCTGAAAACCGTGATGGACGACTTCGCCCAGTTCCTGGACACCTGC |
| | | TGCAAGGCCGCCGACAAGGACACCTGTTTCAGCACCGAGGGCCCCAACCTGGTGACCCGGTCCAAGGACGCC |
| | | CTGGCCCACCATCATCACCATCAC |
| anti- | | |
| LRP6_MOR08168 | | |
| Fab- | | |
| HSA (C:S) | | |
| SEQ ID NO: 219 | 8168-VL/CL | DIELTQPPSVSVAPGQTARISCSGDSLRNKVYWYQQKPGQAPVLVIYKNNRPSGIPERFSGSNSGNTATLTISGTQA |
| | | EDEADYYCQSYDGQKSLVFGGGTKLTVLGQPKAAPSVTLFPPSSEELQANKATLVCLISDFYPGAVTVAWKADSSP |
| | | VKAGVETTTPSKQSNNKYAASSYLSLTPEQWKSHRSYSCQVTHEGSTVEKTVAPTECS |
| SEQ ID NO: 220 | 8168-VL/CL- | GACATCGAGCTGACCCAGCCCCCTTCTGTGTCTGTGGCCCCTGGCCAGACCGCCAGAATCAGCTGCAGCGGC |
| | DNA | GACAGCCTGCGGAACAAGGTGTACTGGTATCAGCAGAAGCCCGGCCAGGCTCCCGTGCTGGTGATCTACAAG |
| | | AACAACCGGCCCAGCGGCATCCCTGAGCGGTTCAGCGGCAGCAACAGCGGCAATACCGCCACCCTGACCATC |
| | | AGCGGCACCCAGGCCGAAGATGAGGCCGACTACTACTGCCAGAGCTACGACGGCCAGAAAAGCCTGGTGTT |
| | | CGGCGGAGGCACCAAGCTTACCGTGCTGGGCCAGCCCAAAGCCGCCCCTAGCGTGACCCTGTTCCCCCCCAG |
| | | CAGCGAGGAACTGCAGGCCAACAAGGCCACCCTGGTCTGCCTGATCAGCGACTTCTACCCTGGCGCCGTGAC |
| | | CGTGGCCTGGAAGGCCGACAGCAGCCCCGTGAAGGCCGGCGTGGAGACAACCACCCCCAGCAAGCAGAGCA |
| | | ACAACAAGTACGCCGCCAGCAGCTACCTGAGCCTGACCCCCGAGCAGTGGAAGAGCCACAGAAGCTACAGCT |
| | | GCCAGGTCACCCACGAGGGCAGCACCGTGGAGAAAACCGTGGCCCCCACCGAGTGCAGC |
| SEQ ID NO: 221 | 8168-VH/CH1- | QVQLVESGGGLVQPGGSLRLSCAASGFTFSDYVINWVRQAPGKGLEWVSGISWSGVNTHYADSVKGRFTISRDN |
| | HSA (C:S) | SKNTLYLQMNSLRAEDTAVYYCARLGATANNIRYKFMDVWGQGTLVTVSSASTKGPSVFPLAPSSKSTSGGTAAL |
| | | GCLVKDYFPEPVTVSWNSGALTSGVHTFPAVLQSSGLYSLSSVVTVPSSSLGTQTYICNVNHKPSNTKVDKKVEPKS |
| | | CDKTHTDAHKSEVAHRFKDLGEENFKALVLIAFAQYLQQSPFEDHVKLVNEVTEFAKTCVADESAENCDKSLHTLF |
| | | GDKLCTVATLRETYGEMADCCAKQEPERNECFLQHKDDNPNLPRLVRPEVDVMCTAFHDNEETFLKKYLYEIARR |
| | | HPYFYAPELLFFAKRYKAAFTECCQAADKAACLLPKLDELRDEGKASSAKQRLKCASLQKFGERAFKAWAVARLSQ |
| | | RFPKAEFAEVSKLVTDLTKVHTECCHGDLLECADDRADLAKYICENQDSISSKLKECCEKPLLEKSHCIAEVENDEMP |
| | | ADLPSLAADFVESKDVCKNYAEAKDVFLGMFLYEYARRHPDYSVVLLLRLAKTYETTLEKCCAAADPHECYAKVFDE |
| | | FKPLVEEPQNLIKQNCELFEQLGEYKFQNALLVRYTKKVPQVSTPTLVEVSRNLGKVGSKCCKHPEAKRMPCAEDYL |
| | | SVVLNQLCVLHEKTPVSDRVTKCCTESLVNRRPCFSALEVDETYVPKEFNAETFTFHADICTLSEKERQIKKQTALVEL |
| | | VKHKPKATKEQLKAVMDDFAAFVEKCCKADDKETCFAEEGKKLVAASQAALGL |
| SEQ ID NO: 222 | 8168-VH/CH1- | CAGGTGCAATTGGTCGAGTCTGGCGGAGGACTGGTGCAGCCTGGTGGCAGCCTGAGACTGAGCTGCGCCGC |
| | HSA-(C:S)-DNA | CAGCGGCTTCACCTTCAGCGACTACGTGATCAACTGGGTGCGACAGGCCCCTGGAAAGGGCCTGGAATGGGT |
| | | GTCCGGCATCTCTTGGTCTGGCGTGAACACCCACTACGCCGACAGCGTGAAGGGCCGGTTCACCATCAGCCG |
| | | GGACAACAGCAAGAACACCCTGTACCTGCAGATGAACAGCCTGAGAGCCGAGGACACCGCCGTGTACTACTG |
| | | TGCCAGACTGGGCGCCACCGCCAACAACATCCGGTACAAGTTCATGGACGTGTGGGGCCAGGGCACACTGGT |
| | | GACCGTCAGCTCAGCTAGCACCAAGGGCCCCAGCGTGTTCCCCCTGGCCCCCTCCAGCAAGTCCACAAGCGGT |
| | | GGCACAGCAGCTCTGGGTTGCCTGGTGAAGGACTACTTCCCCGAGCCCGTGACAGTGTCCTGGAACTCTGGC |
| | | GCCCTGACCTCCGGCGTGCACACCTTCCCCGCCGTGCTGCAGAGCAGCGGCCTGTACAGCCTGAGCAGCGTG |
| | | GTGACAGTCCCCAGCAGCAGCTTGGGCACCCAGACCTACATCTGCAACGTGAACCACAAGCCCAGCAACACC |
| | | AAGGTGGACAAGAAGGTGGAGCCCAAGAGCTGCGACAAGACCCACACCGACGCCCACAAGAGCGAGGTGG |
| | | CCCACCGGTTCAAGGACCTGGGCGAGGAAAACTTCAAGGCCCTGGTGCTGATCGCCTTCGCCCAGTACCTGC |
| | | AGCAGAGCCCCTTCGAAGATCACGTAAAGTTAGTCAACGAGGTTACGGAATTCGCAAAGACATGCGTTGCTG |
| | | ACGAATCCGCTGAGAATTGTGACAAGAGTTTGCACACTTTATTCGGAGATAAGTTGTGTACTGTAGCTACTTT |
| | | GAGAGAGACTTACGGTGAAATGGCTGACTGCTGTGCAAAACAGGAACCAGAACGTAACGAATGTTTCCTTCA |
| | | GCATAAGGATGATAACCCTAACCTTCCAAGGCTTGTTAGGCCAGAAGTCGACGTGATGTGCACCGCCTTCCAT |
| | | GATAATGAAGAGACTTTTCTTAAAAAGTACCTATACGAGATTGCAAGGCGTCATCCATATTTTTACGCCCCAGA |
| | | GCTGTTGTTTTTCGCAAAGAGATACAAAGCTGCATTTACTGAGTGTTGCCAAGCTGCCGACAAGGCCGCTTGT |
| | | TTGCTACCAAAGTTGGACGAATTGAGAGACGAGGGTAAGGCATCATCTGCCAAGCAGAGATTAAAATGTGCA |
| | | TCTTTGCAAAAATTTGGAGAGAGAGCTTTTAAGGCATGGGCTGTTGCCCGACTAAGCCAAAGATTCCCAAAAG |
| | | CCGAATTTGCTGAAGTATCCAAGCTGGTGACTGATTTGACTAAAGTACATACAGAATGTTGCCATGGCGACCT |
| | | TTTAGAATGTGCTGATGACAGAGCAGATTTGGCTAAGTATATCTGCGAAAATCAAGATTCAATCAGCTCTAAG |
| | | CTGAAGGAATGTTGCGAGAAACCACTGTTAGAAAAATCGCATTGTATTGCTGAAGTTGAAAATGATGAGATG |
| | | CCTGCTGACTTGCCTTCTCTTGCCGCTGATTTTGTTGAGTCGAAGGATGTCTGTAAGAATTATGCTGAAGCTAA |
| | | AGACGTTTTCCTGGGTATGTTCTTATATGAGTACGCAAGACGTCACCCAGATTACTCTGTGGTTCTGCTACTGA |
| | | GATTGGCTAAAACATACGAGACAACGCTGGAGAAGTGCTGTGCTGCCGCTGACCCTCATGAGTGCTATGCAA |
| | | AGGTTTTTGATGAATTCAAACCATTGGTTGAAGAGCCTCAAAACTTGATAAAGCAGAACTGTGAGCTGTTTGA |
| | | GCAATTGGGTGAGTATAAGTTCCAAAATGCCCTGTTGGTGAGATATACAAAAAAGGTACCCCAAGTTTCAACG |
| | | CCCACTTTAGTTGAAGTGTCCAGAAATCTTGGTAAAGTGGGTAGCAAATGTTGCAAGCATCCAGAAGCCAAG |
| | | CGAATGCCCTGTGCTGAGGATTATCTGTCCGTCGTGTTGAACCAATTGTGCGTATTACACGAAAAAACCCCAG |
| | | TCTCTGATAGAGTCACCAAATGTTGCACTGAGTCACTAGTTAATAGAAGGCCTTGTTTTTCCGCTTTGGAAGTT |
| | | GATGAAACCTACGTGCCTAAGGAATTTAACGCTGAGACCTTTACCTTTCACGCTGACATTTGTACTTTGAGTGA |
| | | AAAAGAGCGTCAAATCAAAAAGCAAACCGCTCTTGTTGAATTGGTGAAACACAAGCCTAAGGCTACGAAGGA |
| | | GCAGCTTAAAGCCGTCATGGACGATTTCGCCGCATTTGTTGAAAAATGCTGTAAAGCTGATGACAAGGAAAC |
| | | ATGTTTCGCTGAAGAGGGAAAGAAATTGGTTGCGGCCAGTCAGGCCGCACTTGGTTTG |
| anti- | | |
| LRP6_MOR08545- | | |
| MSA | | |
| SEQ ID NO: 223 | 8545-VL/CL | DIELTQPPSVSVAPGQTARISCSGDNIGSKYVHWYQQKPGQAPVLVIYGDSNRPSGIPERFSGSNSGNTATLTISGT |
| | | QAEDEADYYCTRTSTPISGVFGGGTKLTVLGQPKAAPSVTLFPPSSEELQANKATLVCLISDFYPGAVTVAWKADSS |
| | | PVKAGVETTTPSKQSNNKYAASSYLSLTPEQWKSHRSYSCQVTHEGSTVEKTVAPTECS |
| SEQ ID NO: 224 | 8545-VL/CL- | GACATCGAGCTGACCCAGCCCCCCAGCGTGTCTGTGGCCCCTGGCCAGACCGCCCGGATCAGCTGCAGCGGC |
| | DNA | GACAACATCGGCAGCAAATACGTGCACTGGTATCAGCAGAAGCCCGGCCAGGCCCCCGTGCTGGTCATCTAC |
| | | GGCGACAGCAACCGGCCCAGCGGCATCCCCGAGCGGTTCAGCGGCAGCAACAGCGGCAACACCGCCACCCT |
| | | GACCATCAGCGGCACCCAGGCCGAGGACGAGGCCGACTACTACTGCACCCGGACCAGCACCCCCATCTCCGG |
| | | CGTGTTTGGCGGCGGAACAAAGCTGACCGTGCTGGGCCAGCCCAAAGCCGCCCCTAGCGTGACCCTGTTCCC |
| | | CCCCAGCAGCGAGGAACTGCAGGCCAACAAGGCCACCCTGGTCTGCCTGATCAGCGACTTCTACCCTGGCGC |
| | | CGTGACCGTGGCCTGGAAGGCCGACAGCAGCCCCGTGAAGGCCGGCGTGGAGACAACCACCCCCAGCAAGC |
| | | AGAGCAACAACAAGTACGCCGCCAGCAGCTACCTGAGCCTGACCCCCGAGCAGTGGAAGAGCCACAGAAGC |
| | | TACAGCTGCCAGGTCACCCACGAGGGCAGCACCGTGGAGAAAACCGTGGCCCCCACCGAGTGCAGC |
| SEQ ID NO: 225 | 8545-VH/CH1- | QVQLVESGGGLVQPGGSLRLSCAASGFTFSVNGMHWVRQAPGKGLEWVSVIDGMGHTYYADSVKGRFTISRDN |
| | MSA | SKNTLYLQMNSLRAEDTAVYYCARYDYIKYGAFDPWGQGTLVTVSSASTKGPSVFPLAPSSKSTSGGTAALGCLVK |
| | | DYFPEPVTVSWNSGALTSGVHTFPAVLQSSGLYSLSSVVTVPSSSLGTQTYICNVNHKPSNTKVDKKVEPKSCDKTH |
| | | TEAHKSEIAHRYNDLGEQHFKGLVLIAFSQYLQKCSYDEHAKLVQEVTDFAKTCVADESAANCDKSLHTLFGDKLCA |
| | | IPNLRENYGELADCCTKQEPERNECFLQHKDDNPSLPPFERPEAEAMCTSFKENPTTFMGHYLHEVARRHPYFYAP |
| | | ELLYYAEQYNEILTQCCAEADKESCLTPKLDGVKEKALVSSVRQRMKCSSMQKFGERAFKAWAVARLSQTFPNAD |
| | | FAEITKLATDLTKVNKECCHGDLLECADDRAELAKYMCENQATISSKLQTCCDKPLLKKAHCLSEVEHDTMPADLPA |
| | | IAADFVEDQEVCKNYAEAKDVFLGTFLYEYSRRHPDYSVSLLLRLAKKYEATLEKCCAEANPPACYGTVLAEFQPLVE |
| | | EPKNLVKTNCDLYEKLGEYGFQNAILVRYTQKAPQVSTPTLVEAARNLGRVGTKCCTLPEDQRLPCVEDYLSAILNR |
| | | VCLLHEKTPVSEHVTKCCSGSLVERRPCFSALTVDETYVPKEFKAETFTFHSDICTLPEKEKQIKKQTALAELVKHKPK |
| | | ATAEQLKTVMDDFAQFLDTCCKAADKDTCFSTEGPNLVTRCKDALAHHHHHH |
| SEQ ID NO: 226 | 8545-VH/CH1-MSA-DNA | CAGGTGCAGCTGGTCGAGTCTGGCGGGGGACTGGTCCAGCCTGGCGGCAGCCTGAGACTGAGCTGCGCCGC |
| | | CAGCGGCTTCACCTTCAGCGTGAACGGCATGCACTGGGTCCGCCAGGCACCAGGCAAGGGCCTGGAATGGG |
| | | TGTCCGTGATCGACGGCATGGGCCACACCTACTACGCCGACAGCGTGAAGGGCCGGTTCACCATCAGCCGGG |
| | | ACAACAGCAAGAACACCCTGTACCTGCAGATGAACAGCCTGCGGGCCGAGGACACCGCCGTGTACTACTGCG |
| | | CCAGATACGACTACATCAAGTACGGCGCCTTCGACCCCTGGGGCCAGGGCACACTGGTCACCGTGTCCAGCG |
| | | CTAGCACCAAGGGCCCCAGCGTGTTCCCCCTGGCCCCCAGCAGCAAGAGCACCTCTGGCGGCACTGCTGCCCT |
| | | GGGCTGCCTGGTCAAGGACTACTTCCCCGAGCCCGTGACAGTGTCCTGGAACAGCGGAGCCCTGACCTCCGG |
| | | CGTGCACACCTTCCCCGCCGTGCTGCAGAGCAGCGGCCTGTACAGCCTGAGCAGCGTGGTCACAGTGCCCAG |
| | | CAGCAGCCTGGGCACCCAGACCTACATCTGCAACGTGAACCACAAGCCCAGCAACACCAAGGTGGACAAGAA |
| | | GGTGGAGCCCAAGAGCTGCGACAAGACCCACACCGAGGCCCACAAGAGCGAGATCGCCCACCGGTACAACG |
| | | ACCTGGGAGAGCAGCATTTCAAGGGACTGGTGCTGATCGCCTTCAGCCAGTACCTGCAGAAGTGCAGCTACG |
| | | ACGAGCACGCCAAGCTGGTGCAGGAAGTGACCGACTTCGCCAAGACCTGCGTGGCCGACGAGAGCGCCGCC |
| | | AACTGCGACAAGAGCCTGCACACCCTGTTCGGCGACAAGCTGTGCGCCATCCCCAACCTGCGGGAGAACTAC |
| | | GGCGAGCTGGCCGACTGCTGCACCAAGCAGGAACCCGAGCGGAACGAGTGCTTCCTGCAGCACAAGGACGA |
| | | CAACCCCAGCCTGCCCCCCTTCGAGAGGCCTGAGGCCGAGGCCATGTGCACCAGCTTCAAAGAGAACCCCAC |
| | | CACCTTCATGGGCCACTACCTGCACGAGGTGGCCAGGCGGCACCCCTACTTCTACGCCCCCGAGCTGCTGTAC |
| | | TACGCCGAGCAGTACAACGAGATCCTGACCCAGTGCTGCGCCGAGGCCGACAAAGAGAGCTGCCTGACCCCC |
| | | AAGCTGGACGGCGTGAAAGAAAAGGCCCTGGTGTCCAGCGTGCGGCAGCGGATGAAGTGCAGCAGCATGC |
| | | AGAAGTTCGGCGAGCGGGCCTTCAAGGCCTGGGCCGTGGCCCGGCTGTCCCAGACCTTCCCCAACGCCGATT |
| | | TCGCCGAGATCACCAAGCTGGCCACCGACCTGACCAAGGTGAACAAAGAGTGCTGTCACGGCGACCTGCTGG |
| | | AATGCGCCGACGACCGGGCCGAGCTGGCCAAGTACATGTGCGAGAACCAGGCCACCATCAGCTCCAAACTGC |
| | | AGACCTGCTGTGATAAGCCCCTGCTGAAGAAGGCCCACTGCCTGAGCGAGGTGGAGCACGACACCATGCCCG |
| | | CCGACCTGCCCGCCATTGCCGCCGACTTCGTGGAGGACCAGGAAGTGTGCAAGAATTACGCCGAGGCCAAGG |
| | | ACGTGTTCCTGGGCACCTTCCTGTACGAGTACAGCAGACGGCACCCCGACTACAGCGTGAGCCTGCTGCTGA |
| | | GGCTGGCCAAGAAGTACGAGGCCACCCTGGAAAAGTGTTGCGCCGAAGCCAACCCCCCTGCCTGCTACGGCA |
| | | CCGTGCTGGCCGAGTTCCAGCCCCTGGTGGAGGAACCCAAGAACCTGGTGAAAACCAACTGCGATCTGTACG |
| | | AGAAGCTGGGCGAGTACGGCTTCCAGAACGCCATCCTGGTCCGGTACACCCAGAAAGCCCCCCAGGTGTCCA |
| | | CCCCCACACTGGTGGAGGCCGCCAGGAACCTGGGCAGAGTCGGCACCAAGTGCTGCACCCTGCCCGAGGATC |
| | | AGAGGCTGCCCTGTGTCGAGGACTACCTGAGCGCCATCCTGAACAGAGTGTGCCTGCTGCACGAGAAAACCC |
| | | CCGTGAGCGAGCACGTGACCAAGTGTTGCAGCGGCAGCCTGGTGGAGCGGAGGCCCTGCTTCAGCGCCCTG |
| | | ACCGTGGACGAGACATACGTGCCCAAAGAGTTCAAGGCCGAGACATTCACCTTCCACAGCGACATCTGTACCC |
| | | TGCCTGAGAAAGAGAAGCAGATCAAGAAGCAGACCGCCCTGGCCGAACTGGTGAAGCACAAGCCCAAGGCC |
| | | ACCGCCGAGCAGCTGAAAACCGTGATGGACGACTTCGCCCAGTTCCTGGACACCTGCTGCAAGGCCGCCGAC |
| | | AAGGACACCTGTTTCAGCACCGAGGGCCCCAACCTGGTGACCCGGTGCAAGGACGCCCTGGCCCACCATCAT |
| | | CACCATCAC |
| anti- | | |
| LRP6_MORO6707- | | |
| MSA | | |
| SEQ ID NO: 227 | 6707-VL/CL | DIELTQPPSVSVAPGQTARISCSGDNIGSKYVHWYQQKPGQAPVLVIYGDSNRPSGIPERFSGSNSGNTATLTISGT |
| | | QAEDEADYYCSSYDLARTVFGGGTKLTVLGQPKAAPSVTLFPPSSEELQANKATLVCLISDFYPGAVTVAWKADSSP |
| | | VKAGVETTTPSKQSNNKYAASSYLSLTPEQWKSHRSYSCQVTHEGSTVEKTVAPTECS |
| SEQ ID NO: 228 | 6707-VL/CL- | GACATCGAGCTGACCCAGCCCCCCAGCGTGTCTGTGGCCCCTGGCCAGACCGCCCGGATCAGCTGCAGCGGC |
| | DNA | GACAACATCGGCAGCAAATACGTGCACTGGTATCAGCAGAAGCCCGGCCAGGCCCCCGTGCTGGTCATCTAC |
| | | GGCGACAGCAACCGGCCCAGCGGCATCCCCGAGCGGTTCAGCGGCAGCAACAGCGGCAACACCGCCACCCT |
| | | GACCATCAGCGGCACCCAGGCCGAGGACGAGGCCGACTACTACTGCAGCAGCTACGACCTGGCCCGGACCG |
| | | TGTTTGGCGGCGGAACAAAGCTGACCGTGCTGGGCCAGCCCAAAGCCGCCCCTAGCGTGACCCTGTTCCCCC |
| | | CCAGCAGCGAGGAACTGCAGGCCAACAAGGCCACCCTGGTCTGCCTGATCAGCGACTTCTACCCTGGCGCCG |
| | | TGACCGTGGCCTGGAAGGCCGACAGCAGCCCCGTGAAGGCCGGCGTGGAGACAACCACCCCCAGCAAGCAG |
| | | AGCAACAACAAGTACGCCGCCAGCAGCTACCTGAGCCTGACCCCCGAGCAGTGGAAGAGCCACAGAAGCTAC |
| | | AGCTGCCAGGTCACCCACGAGGGCAGCACCGTGGAGAAAACCGTGGCCCCCACCGAGTGCAGC |
| SEQ ID NO: 229 | 6707-VH/CH1- | QVQLVESGGGLVQPGGSLRLSCAASGFTFSVNGMHWVRQAPGKGLEWVSNISGSSSFTYYADSVKGRFTISRDN |
| | MSA | SKNTLYLQMNSLRAEDTAVYYCARYDYIKYGAFDPWGQGTLVTVSSASTKGPSVFPLAPSSKSTSGGTAALGCLVK |
| | | DYFPEPVTVSWNSGALTSGVHTFPAVLQSSGLYSLSSVVTVPSSSLGTQTYICNVNHKPSNTKVDKKVEPKSCDKTH |
| | | TEAHKSEIAHRYNDLGEQHFKGLVLIAFSQYLQKCSYDEHAKLVQEVTDFAKTCVADESAANCDKSLHTLFGDKLCA |
| | | IPNLRENYGELADCCTKQEPERNECFLQHKDDNPSLPPFERPEAEAMCTSFKENPTTFMGHYLHEVARRHPYFYAP |
| | | ELLYYAEQYNEILTQCCAEADKESCLTPKLDGVKEKALVSSVRQRMKCSSMQKFGERAFKAWAVARLSQTFPNAD |
| | | FAEITKLATDLTKVNKECCHGDLLECADDRAELAKYMCENQATISSKLQTCCDKPLLKKAHCLSEVEHDTMPADLPA |
| | | IAADFVEDQEVCKNYAEAKDVFLGTFLYEYSRRHPDYSVSLLLRLAKKYEATLEKCCAEANPPACYGTVLAEFQPLVE |
| | | EPKNLVKTNCDLYEKLGEYGFQNAILVRYTQKAPQVSTPTLVEAARNLGRVGTKCCTLPEDQRLPCVEDYLSAILNR |
| | | VCLLHEKTPVSEHVTKCCSGSLVERRPCFSALTVDETYVPKEFKAETFTFHSDICTLPEKEKQIKKQTALAELVKHKPK |
| | | ATAEQLKTVMDDFAQFLDTCCKAADKDTCFSTEGPNLVTRCKDALAHHHHHH |
| SEQ ID NO: 230 | 6707-VH/CH1- | CAGGTGCAGCTGGTCGAGTCTGGCGGGGGACTGGTCCAGCCTGGCGGCAGCCTGAGACTGAGCTGCGCCGC |
| | MSA-DNA | CAGCGGCTTCACCTTCAGCGTGAACGGCATGCACTGGGTCCGCCAGGCACCAGGCAAGGGCCTGGAATGGG |
| | | TGTCCAACATCAGCGGCAGCAGCAGCTTCACCTACTACGCCGACAGCGTGAAGGGCCGGTTCACCATCAGCC |
| | | GGGACAACAGCAAGAACACCCTGTACCTGCAGATGAACAGCCTGCGGGCCGAGGACACCGCCGTGTACTACT |
| | | GCGCCAGATACGACTACATCAAGTACGGCGCCTTCGACCCCTGGGGCCAGGGCACACTGGTCACCGTGTCCA |
| | | GCGCTAGCACCAAGGGCCCCAGCGTGTTCCCCCTGGCCCCCAGCAGCAAGAGCACCTCTGGCGGCACTGCTG |
| | | CCCTGGGCTGCCTGGTCAAGGACTACTTCCCCGAGCCCGTGACAGTGTCCTGGAACAGCGGAGCCCTGACCTC |
| | | CGGCGTGCACACCTTCCCCGCCGTGCTGCAGAGCAGCGGCCTGTACAGCCTGAGCAGCGTGGTCACAGTGCC |
| | | CAGCAGCAGCCTGGGCACCCAGACCTACATCTGCAACGTGAACCACAAGCCCAGCAACACCAAGGTGGACAA |
| | | GAAGGTGGAGCCCAAGAGCTGCGACAAGACCCACACCGAGGCCCACAAGAGCGAGATCGCCCACCGGTACA |
| | | ACGACCTGGGAGAGCAGCATTTCAAGGGACTGGTGCTGATCGCCTTCAGCCAGTACCTGCAGAAGTGCAGCT |
| | | ACGACGAGCACGCCAAGCTGGTGCAGGAAGTGACCGACTTCGCCAAGACCTGCGTGGCCGACGAGAGCGCC |
| | | GCCAACTGCGACAAGAGCCTGCACACCCTGTTCGGCGACAAGCTGTGCGCCATCCCCAACCTGCGGGAGAAC |
| | | TACGGCGAGCTGGCCGACTGCTGCACCAAGCAGGAACCCGAGCGGAACGAGTGCTTCCTGCAGCACAAGGA |
| | | CGACAACCCCAGCCTGCCCCCCTTCGAGAGGCCTGAGGCCGAGGCCATGTGCACCAGCTTCAAAGAGAACCC |
| | | CACCACCTTCATGGGCCACTACCTGCACGAGGTGGCCAGGCGGCACCCCTACTTCTACGCCCCCGAGCTGCTG |
| | | TACTACGCCGAGCAGTACAACGAGATCCTGACCCAGTGCTGCGCCGAGGCCGACAAAGAGAGCTGCCTGACC |
| | | CCCAAGCTGGACGGCGTGAAAGAAAAGGCCCTGGTGTCCAGCGTGCGGCAGCGGATGAAGTGCAGCAGCAT |
| | | GCAGAAGTTCGGCGAGCGGGCCTTCAAGGCCTGGGCCGTGGCCCGGCTGTCCCAGACCTTCCCCAACGCCGA |
| | | TTTCGCCGAGATCACCAAGCTGGCCACCGACCTGACCAAGGTGAACAAAGAGTGCTGTCACGGCGACCTGCT |
| | | GGAATGCGCCGACGACCGGGCCGAGCTGGCCAAGTACATGTGCGAGAACCAGGCCACCATCAGCTCCAAACT |
| | | GCAGACCTGCTGTGATAAGCCCCTGCTGAAGAAGGCCCACTGCCTGAGCGAGGTGGAGCACGACACCATGCC |
| | | CGCCGACCTGCCCGCCATTGCCGCCGACTTCGTGGAGGACCAGGAAGTGTGCAAGAATTACGCCGAGGCCAA |
| | | GGACGTGTTCCTGGGCACCTTCCTGTACGAGTACAGCAGACGGCACCCCGACTACAGCGTGAGCCTGCTGCT |
| | | GAGGCTGGCCAAGAAGTACGAGGCCACCCTGGAAAAGTGTTGCGCCGAAGCCAACCCCCCTGCCTGCTACGG |
| | | CACCGTGCTGGCCGAGTTCCAGCCCCTGGTGGAGGAACCCAAGAACCTGGTGAAAACCAACTGCGATCTGTA |
| | | CGAGAAGCTGGGCGAGTACGGCTTCCAGAACGCCATCCTGGTCCGGTACACCCAGAAAGCCCCCCAGGTGTC |
| | | CACCCCCACACTGGTGGAGGCCGCCAGGAACCTGGGCAGAGTCGGCACCAAGTGCTGCACCCTGCCCGAGG |
| | | ATCAGAGGCTGCCCTGTGTCGAGGACTACCTGAGCGCCATCCTGAACAGAGTGTGCCTGCTGCACGAGAAAA |
| | | CCCCCGTGAGCGAGCACGTGACCAAGTGTTGCAGCGGCAGCCTGGTGGAGCGGAGGCCCTGCTTCAGCGCC |
| | | CTGACCGTGGACGAGACATACGTGCCCAAAGAGTTCAAGGCCGAGACATTCACCTTCCACAGCGACATCTGT |
| | | ACCCTGCCTGAGAAAGAGAAGCAGATCAAGAAGCAGACCGCCCTGGCCGAACTGGTGAAGCACAAGCCCAA |
| | | GGCCACCGCCGAGCAGCTGAAAACCGTGATGGACGACTTCGCCCAGTTCCTGGACACCTGCTGCAAGGCCGC |
| | | CGACAAGGACACCTGTTTCAGCACCGAGGGCCCCAACCTGGTGACCCGGTGCAAGGACGCCCTGGCCCACCA |
| | | TCATCACCATCAC |
| anti- | | |
| LRP6_MOR06706- | | |
| MSA | | |
| SEQ ID NO: 231 | 6706-VL/CL | DIELTQPPSVSVAPGQTARISCSGDNIRKKYVYWYQQKPGQAPVLVIYEDSKRPSGIPERFSGSNSGNTATLTISGTQ |
| | | AEDEADYYCSTADSGINNGVFGGGTKLTVLGQPKAAPSVTLFPPSSEELQANKATLVCLISDFYPGAVTVAWKADS |
| | | SPVKAGVETTTPSKQSNNKYAASSYLSLTPEQWKSHRSYSCQVTHEGSTVEKTVAPTECS |
| SEQ ID NO: 232 | 6706-VL/CL- | GATATCGAACTGACCCAGCCGCCTTCAGTGAGCGTTGCACCAGGTCAGACCGCGCGTATCTCGTGTAGCGGC |
| | DNA | GATAATATTCGTAAGAAGTATGTTTATTGGTACCAGCAGAAACCCGGGCAGGCGCCAGTTCTTGTGATTTATG |
| | | AGGATTCTAAGCGTCCCTCAGGCATCCCGGAACGCTTTAGCGGATCCAACAGCGGCAACACCGCGACCCTGA |
| | | CCATTAGCGGCACTCAGGCGGAAGACGAAGCGGATTATTATTGCTCTACTGCTGATTCTGGTATTAATAATGG |
| | | TGTGTTTGGCGGCGGCACGAAGCTTACCGTGCTGGGCCAGCCCAAAGCCGCCCCTAGCGTGACCCTGTTCCCC |
| | | CCCAGCAGCGAGGAACTGCAGGCCAACAAGGCCACCCTGGTCTGCCTGATCAGCGACTTCTACCCTGGCGCC |
| | | GTGACCGTGGCCTGGAAGGCCGACAGCAGCCCCGTGAAGGCCGGCGTGGAGACAACCACCCCCAGCAAGCA |
| | | GAGCAACAACAAGTACGCCGCCAGCAGCTACCTGAGCCTGACCCCCGAGCAGTGGAAGAGCCACAGAAGCT |
| | | ACAGCTGCCAGGTCACCCACGAGGGCAGCACCGTGGAGAAAACCGTGGCCCCCACCGAGTGCAGC |
| SEQ ID NO: 233 | 6706-VH/CH1- | QVQLVESGGGLVQPGGSLRLSCAASGFTFSDYAIHWVRQAPGKGLEWVSGISYSGSSTHYADSVKGRFTISRDNSK |
| | MSA | NTLYLQMNSLRAEDTAVYYCARGSHGNIMAKRYFDFWGQGTLVTVSSASTKGPSVFPLAPSSKSTSGGTAALGCL |
| | | VKDYFPEPVTVSWNSGALTSGVHTFPAVLQSSGLYSLSSVVTVPSSSLGTQTYICNVNHKPSNTKVDKKVEPKSCDK |
| | | THTEAHKSEIAHRYNDLGEQHFKGLVLIAFSQYLQKCSYDEHAKLVQEVTDFAKTCVADESAANCDKSLHTLFGDKL |
| | | CAIPNLRENYGELADCCTKQEPERNECFLQHKDDNPSLPPFERPEAEAMCTSFKENPTTFMGHYLHEVARRHPYFY |
| | | APELLYYAEQYNEILTQCCAEADKESCLTPKLDGVKEKALVSSVRQRMKCSSMQKFGERAFKAWAVARLSQTFPN |
| | | ADFAEITKLATDLTKVNKECCHGDLLECADDRAELAKYMCENQATISSKLQTCCDKPLLKKAHCLSEVEHDTMPAD |
| | | LPAIAADFVEDQEVCKNYAEAKDVFLGTFLYEYSRRHPDYSVSLLLRLAKKYEATLEKCCAEANPPACYGTVLAEFQP |
| | | LVEEPKNLVKTNCDLYEKLGEYGFQNAILVRYTQKAPQVSTPTLVEAARNLGRVGTKCCTLPEDQRLPCVEDYLSAIL |
| | | NRVCLLHEKTPVSEHVTKCCSGSLVERRPCFSALTVDETYVPKEFKAETFTFHSDICTLPEKEKQIKKQTALAELVKHK |
| | | PKATAEQLKTVMDDFAQFLDTCCKAADKDTCFSTEGPNLVTRCKDALAHHHHHH |
| SEQ ID NO: 234 | 6706-VH/CH1- | CAGGTGCAATTGGTGGAAAGCGGCGGCGGCCTGGTGCAACCGGGCGGCAGCCTGCGTCTGAGCTGCGCGGC |
| | MSA-DNA | CTCCGGATTTACCTTTTCTGATTATGCTATTCATTGGGTGCGCCAAGCCCCTGGGAAGGGTCTCGAGTGGGTG |
| | | AGCGGTATCTCTTATTCTGGTAGCTCTACCCATTATGCGGATAGCGTGAAAGGCCGTTTTACCATTTCACGTGA |
| | | TAATTCGAAAAACACCCTGTATCTGCAAATGAACAGCCTGCGTGCGGAAGATACGGCCGTGTATTATTGCGCG |
| | | CGTGGTTCTCATGGTAATATTATGGCTAAGCGTTATTTTGATTTTTGGGGCCAAGGCACCCTGGTGACGGTTA |
| | | GCTCAGCTAGCACCAAGGGCCCCAGCGTGTTCCCCCTGGCCCCCAGCAGCAAGAGCACCTCTGGCGGCACTG |
| | | CTGCCCTGGGCTGCCTGGTCAAGGACTACTTCCCCGAGCCCGTGACAGTGTCCTGGAACAGCGGAGCCCTGA |
| | | CCTCCGGCGTGCACACCTTCCCCGCCGTGCTGCAGAGCAGCGGCCTGTACAGCCTGAGCAGCGTGGTCACAG |
| | | TGCCCAGCAGCAGCCTGGGCACCCAGACCTACATCTGCAACGTGAACCACAAGCCCAGCAACACCAAGGTCG |
| | | ACAAGAAGGTGGAGCCCAAGAGCTGCGACAAGACCCACACCGAGGCCCACAAGAGCGAGATCGCCCACCGG |
| | | TACAACGACCTGGGAGAGCAGCATTTCAAGGGACTGGTGCTGATCGCCTTCAGCCAGTACCTGCAGAAGTGC |
| | | AGCTACGACGAGCACGCCAAGCTGGTGCAGGAAGTGACCGACTTCGCCAAGACCTGCGTGGCCGACGAGAG |
| | | CGCCGCCAACTGCGACAAGAGCCTGCACACCCTGTTCGGCGACAAGCTGTGCGCCATCCCCAACCTGCGGGA |
| | | GAACTACGGCGAGCTGGCCGACTGCTGCACCAAGCAGGAACCCGAGCGGAACGAGTGCTTCCTGCAGCACA |
| | | AGGACGACAACCCCAGCCTGCCCCCCTTCGAGAGGCCTGAGGCCGAGGCCATGTGCACCAGCTTCAAAGAGA |
| | | ACCCCACCACCTTCATGGGCCACTACCTGCACGAGGTGGCCAGGCGGCACCCCTACTTCTACGCCCCCGAGCT |
| | | GCTGTACTACGCCGAGCAGTACAACGAGATCCTGACCCAGTGCTGCGCCGAGGCCGACAAAGAGAGCTGCCT |
| | | GACCCCCAAGCTGGACGGCGTGAAAGAAAAGGCCCTGGTGTCCAGCGTGCGGCAGCGGATGAAGTGCAGCA |
| | | GCATGCAGAAGTTCGGCGAGCGGGCCTTCAAGGCCTGGGCCGTGGCCCGGCTGTCCCAGACCTTCCCCAACG |
| | | CCGATTTCGCCGAGATCACCAAGCTGGCCACCGACCTGACCAAGGTGAACAAAGAGTGCTGTCACGGCGACC |
| | | TGCTGGAATGCGCCGACGACCGGGCCGAGCTGGCCAAGTACATGTGCGAGAACCAGGCCACCATCAGCTCCA |
| | | AACTGCAGACCTGCTGTGATAAGCCCCTGCTGAAGAAGGCCCACTGCCTGAGCGAGGTGGAGCACGACACCA |
| | | TGCCCGCCGACCTGCCCGCCATTGCCGCCGACTTCGTGGAGGACCAGGAAGTGTGCAAGAATTACGCCGAGG |
| | | CCAAGGACGTGTTCCTGGGCACCTTCCTGTACGAGTACAGCAGACGGCACCCCGACTACAGCGTGAGCCTGC |
| | | TGCTGAGGCTGGCCAAGAAGTACGAGGCCACCCTGGAAAAGTGTTGCGCCGAAGCCAACCCCCCTGCCTGCT |
| | | ACGGCACCGTGCTGGCCGAGTTCCAGCCCCTGGTGGAGGAACCCAAGAACCTGGTGAAAACCAACTGCGATC |
| | | TGTACGAGAAGCTGGGCGAGTACGGCTTCCAGAACGCCATCCTGGTCCGGTACACCCAGAAAGCCCCCCAGG |
| | | TGTCCACCCCCACACTGGTGGAGGCCGCCAGGAACCTGGGCAGAGTCGGCACCAAGTGCTGCACCCTGCCCG |
| | | AGGATCAGAGGCTGCCCTGTGTCGAGGACTACCTGAGCGCCATCCTGAACAGAGTGTGCCTGCTGCACGAGA |
| | | AAACCCCCGTGAGCGAGCACGTGACCAAGTGTTGCAGCGGCAGCCTGGTGGAGCGGAGGCCCTGCTTCAGC |
| | | GCCCTGACCGTGGACGAGACATACGTGCCCAAAGAGTTCAAGGCCGAGACATTCACCTTCCACAGCGACATC |
| | | TGTACCCTGCCTGAGAAAGAGAAGCAGATCAAGAAGCAGACCGCCCTGGCCGAACTGGTGAAGCACAAGCC |
| | | CAAGGCCACCGCCGAGCAGCTGAAAACCGTGATGGACGACTTCGCCCAGTTCCTGGACACCTGCTGCAAGGC |
| | | CGCCGACAAGGACACCTGTTTCAGCACCGAGGGCCCCAACCTGGTGACCCGGTGCAAGGACGCCCTGGCCCA |
| | | CCATCATCACCATCAC |
| anti-LRP6 | | |
| MOR06475 | | |
| Fab-MSA | | |
| SEQ ID NO: 235 | 6475-VL/CL | divltqspatlslspgeratlscrasqfigsrylawyqqkpgqaprlliygasnratgvparfsgsgsgtdftltisslepedfatyycqqyydypqtf |
| | | gqgtkveikrtvaapsvfifppsdeqlksgtasvvcllnnfypreakvqwkvdnalqsgnsqesvteqdskdstyslsstltlskadyekhkvy |
| | | acevthqglsspvtksfnrgec |
| SEQ ID NO: 236 | 6475-VL/CL | gatatcgtgctgacccagagcccggcgaccctgagcctgtctccgggcgaacgtgcgaccctgagctgcagagcgagccagtttattggttctcg |
| | DNA | ttatctggcttggtaccagcagaaaccaggtcaagcaccgcgtctattaatttatggtgcttctaatcgtgcaactggggtcccggcgcgttttagc |
| | | ggctctggatccggcacggattttaccctgaccattagcagcctggaacctgaagactttgcgacttattattgccagcagtattatgattatcctc |
| | | agacctttggccagggtacgaaagttgaaattaaacgtacggtggccgctcccagcgtgttcatcttcccccccagcgacgagcagctgaagag |
| | | cggcaccgccagcgtggtgtgcctgctgaacaacttctacccccgggaggccaaggtgcagtggaaggtggacaacgccctgcagagcggcaa |
| | | cagccaggagagcgtcaccgagcaggacagcaaggactccacctacagcctgagcagcaccctgaccctgagcaaggccgactacgagaag |
| | | cataaggtgtacgcctgcgaggtgacccaccagggcctgtccagccccgtgaccaagagcttcaacaggggcgagtgc |
| SEQ ID NO: 237 | 6475-VH/CH1- | qvqlkesgpalvkptqtltltctfsgfslsnrgggvgwirqppgkalewlawidwdddksystslktrltiskdtsknqvvltmtnmdpvdtaty |
| | MSA | ycarmhlplvfdswgqgtlvtvssastkgpsvfplapsskstsggtaalgclvkdyfpepvtvswnsgaltsgvhtfpavlqssglyslssvvtvp |
| | | ssslgtqtyicnvnhkpsntkvdkrvepkscdkthteahkseiahryndlgeqhfkglvliafsqylqkcsydehaklvqevtdfaktevades |
| | | aancdkslhtlfgdklcaipnlrenygeladcctkqepernecflqhkddnpslppferpeaeamctsfkenpttfmghylhevarrhpyfy |
| | | apellyyaeqyneiltqccaeadkescltpkldgvkekalvssvrqrmkcssmqkfgerafkawavarlsqtfpnadfaeitklatdltkvnke |
| | | cchgdllecaddraelakymcenqatissklqtccdkpllkkahclsevehdtmpadlpaiaadfvedqevcknyaeakdvflgtflyeysrr |
| | | hpdysvslllrlakkyeatlekccaeanppacygtvlaefqplveepknlvktncdlyeklgeygfqnailvrytqkapqvstptlveaarnlgrv |
| | | gtkcctlpedqrlpcvedylsailnrvcllhektpvsehvtkccsgslverrpcfsaltvdetyvpkefkaetftfhsdictlpekekqikkqtalael |
| | | vkhkpkataeqlktvmddfaqfldtcckaadkdtcfstegpnlvtrckdalahhhhhh |
| SEQ ID NO: 238 | 6475-VH/CH1- | caggtgcaattgaaagaaagcggcccggccctggtgaaaccgacccaaaccctgaccctgacctgtaccttttccggatttagcctgtctaatcg |
| | MSA-DNA | tggtggtggtgtgggttggattcgccagccgcctgggaaagccctcgagtggctggcttggatcgattgggatgatgataagtcttatagcacca |
| | | gcctgaaaacgcgtctgaccattagcaaagatacttcgaaaaatcaggtggtgctgactatgaccaacatggacccggtggatacggccaccta |
| | | ttattgcgcgcgtatgcatcttcctcttgtttttgattcttggggccaaggcaccctggtgacggttagctcagctagcaccaagggccccagcgtg |
| | | ttccccctggcccccagcagcaagagcaccagcggcggcacagccgccctgggctgcctggtgaaggactacttccccgagcccgtgaccgtgt |
| | | cctggaacagcggagccctgacctccggcgtgcacaccttccccgccgtgctgcagagcagcggcctgtacagcctgtccagcgtggtgacagt |
| | | gcccagcagcagcctgggcacccagacctacatctgcaacgtgaaccacaagcccagcaacaccaaggtggacaagagagtggagcccaag |
| | | agctgcgacaagacccacaccgaggcccacaagagcgagatcgcccaccggtacaacgacctgggagagcagcatttcaagggactggtgct |
| | | gatcgccttcagccagtacctgcagaagtgcagctacgacgagcacgccaagctggtgcaggaagtgaccgacttcgccaagacctgcgtggc |
| | | cgacgagagcgccgccaactgcgacaagagcctgcacaccctgttcggcgacaagctgtgcgccatccccaacctgcgggagaactacggcg |
| | | agctggccgactgctgcaccaagcaggaacccgagcggaacgagtgcttcctgcagcacaaggacgacaaccccagcctgccccccttcgaga |
| | | ggcctgaggccgaggccatgtgcaccagcttcaaagagaaccccaccaccttcatgggccactacctgcacgaggtggccaggcggcacccct |
| | | acttctacgcccccgagctgctgtactacgccgagcagtacaacgagatcctgacccagtgctgcgccgaggccgacaaagagagctgcctga |
| | | cccccaagctggacggcgtgaaagaaaaggccctggtgtccagcgtgcggcagcggatgaagtgcagcagcatgcagaagttcggcgagcgg |
| | | gccttcaaggcctgggccgtggcccggctgtcccagaccttccccaacgccgatttcgccgagatcaccaagctggccaccgacctgaccaagg |
| | | tgaacaaagagtgctgtcacggcgacctgctggaatgcgccgacgaccgggccgagctggccaagtacatgtgcgagaaccaggccaccatc |
| | | agctccaaactgcagacctgctgtgataagcccctgctgaagaaggcccactgcctgagcgaggtggagcacgacaccatgcccgccgacctg |
| | | cccgccattgccgccgacttcgtggaggaccaggaagtgtgcaagaattacgccgaggccaaggacgtgttcctgggcaccttcctgtacgagt |
| | | acagcagacggcaccccgactacagcgtgagcctgctgctgaggctggccaagaagtacgaggccaccctggaaaagtgttgcgccgaagcc |
| | | aacccccctgcctgctacggcaccgtgctggccgagttccagcccctggtggaggaacccaagaacctggtgaaaaccaactgcgatctgtacg |
| | | agaagctgggcgagtacggcttccagaacgccatcctggtccggtacacccagaaagccccccaggtgtccacccccacactggtggaggccg |
| | | ccaggaacctgggcagagtcggcaccaagtgctgcaccctgcccgaggatcagaggctgccctgtgtcgaggactacctgagcgccatcctga |
| | | acagagtgtgcctgctgcacgagaaaacccccgtgagcgagcacgtgaccaagtgttgcagcggcagcctggtggagcggaggccctgcttca |
| | | gcgccctgaccgtggacgagacatacgtgcccaaagagttcaaggccgagacattcaccttccacagcgacatctgtaccctgcctgagaaag |
| | | agaagcagatcaagaagcagaccgccctggccgaactggtgaagcacaagcccaaggccaccgccgagcagctgaaaaccgtgatggacga |
| | | cttcgcccagttcctggacacctgctgcaaggccgccgacaaggacacctgtttcagcaccgagggccccaacctggtgacccggtgcaaggac |
| | | gccctggcccaccatcatcaccatcac |
| Anti-LRP6 | | |
| MOR06475 | | |
| scFv-MSA | | |
| SEQ ID NO: 239 | 6475-scFv- | divltqspatlslspgeratlscrasqfigsrylawyqqkpgqaprlliygasnratgvparfsgsgsgtdftltisslepedfatyycqqyydypqtf |
| | MSA | gqgtkveikggggsggggsggggsggggsqvqlkesgpalvkptqtltltctfsgfslsnrgggvgwirqppgkalewlawidwdddksystsl |
| | | ktrltiskdtsknqvvltmtnmdpvdtatyycarmhlplvfdswgqgtlvtvssggggsggggseahkseiahryndlgeqhfkglvliafsqy |
| | | lqkcsydehaklvqevtdfaktcvadesaancdkslhtlfgdklcaipnlrenygeladcctkqepernecflqhkddnpslppferpeaea |
| | | mctsfkenpttfmghylhevarrhpyfyapellyyaeqyneiltqccaeadkescltpkldgvkekalvssvrqrmkcssmqkfgerafkaw |
| | | avarlsqtfpnadfaeitklatdltkvnkecchgdllecaddraelakymcenqatissklqtccdkpllkkahclsevehdtmpadlpaiaad |
| | | fvedqevcknyaeakdvflgtflyeysrrhpdysvslllrlakkyeatlekccaeanppacygtvlaefqplveepknlvktncdlyeklgeygf |
| | | qnailvrytqkapqvstptlveaarnlgrvgtkcctlpedqrlpcvedylsailnrvcllhektpvsehvtkccsgslverrpcfsaltvdetyvpke |
| | | fkaetftfhsdictlpekekqikkqtalaelvkhkpkataeqlktvmddfaqfldtcckaadkdtcfstegpnlvtrckdalahhhhhh |
| SEQ ID NO: 240 | 6475-scFv- | gatatcgtgctgacacagagccctgccaccctgtctctgagccctggcgagagagccaccctgagctgccgggccagccagttcatcggctccc |
| | MSADNA | gctacctggcctggtatcagcagaagcccggacaggctcccagactgctgatctacggcgccagcaacagagctaccggcgtgcccgccagatt |
| | | ttctggcagcggcagcggcaccgacttcaccctgaccatcagcagcctggaacccgaggacttcgccacctactactgccagcagtactacgac |
| | | tacccccagaccttcggccagggcaccaaggtggagatcaagggcggaggcggaagcgggggtggcggaagtggaggcggaggaagcgga |
| | | gggggcggaagccaggtgcaattgaaagagtccggccctgccctggtgaagcctacccagaccctgaccctgacatgcaccttcagcggcttca |
| | | gcctgagcaacagaggcggcggagtgggctggatcagacagcctcccggcaaggccctggaatggctggcctggatcgactgggacgacgac |
| | | aagagctacagcaccagcctgaaaacccggctgaccatctccaaggacaccagcaagaaccaggtggtgctcaccatgaccaacatggaccc |
| | | cgtggacaccgccacctattattgcgcccggatgcatctgcccctggtgttcgatagctggggccagggaaccctggtgacagtgtccagcggcg |
| | | gaggcggatccgggggtggcggaagtgaggcccacaagagcgagatcgcccaccggtacaacgacctgggagagcagcatttcaagggact |
| | | ggtgctgatcgccttcagccagtacctgcagaagtgcagctacgacgagcacgccaagctggtgcaggaagtgaccgacttcgccaagacctg |
| | | cgtggccgacgagagcgccgccaactgcgacaagagcctgcacaccctgttcggcgacaagctgtgcgccatccccaacctgcgggagaacta |
| | | cggcgagctggccgactgctgcaccaagcaggaacccgagcggaacgagtgcttcctgcagcacaaggacgacaaccccagcctgcccccctt |
| | | cgagaggcctgaggccgaggccatgtgcaccagcttcaaagagaaccccaccaccttcatgggccactacctgcacgaggtggccaggcggca |
| | | cccctacttctacgcccccgagctgctgtactacgccgagcagtacaacgagatcctgacccagtgctgcgccgaggccgacaaagagagctgc |
| | | ctgacccccaagctggacggcgtgaaagaaaaggccctggtgtccagcgtgcggcagcggatgaagtgcagcagcatgcagaagttcggcga |
| | | gcgggccttcaaggcctgggccgtggcccggctgtcccagaccttccccaacgccgatttcgccgagatcaccaagctggccaccgacctgacc |
| | | aaggtgaacaaagagtgctgtcacggcgacctgctggaatgcgccgacgaccgggccgagctggccaagtacatgtgcgagaaccaggccac |
| | | catcagctccaaactgcagacctgctgtgataagcccctgctgaagaaggcccactgcctgagcgaggtggagcacgacaccatgcccgccga |
| | | cctgcccgccattgccgccgacttcgtggaggaccaggaagtgtgcaagaattacgccgaggccaaggacgtgttcctgggcaccttcctgtac |
| | | gagtacagcagacggcaccccgactacagcgtgagcctgctgctgaggctggccaagaagtacgaggccaccctggaaaagtgttgcgccga |
| | | agccaacccccctgcctgctacggcaccgtgctggccgagttccagcccctggtggaggaacccaagaacctggtgaaaaccaactgcgatctg |
| | | tacgagaagctgggcgagtacggcttccagaacgccatcctggtccggtacacccagaaagccccccaggtgtccacccccacactggtggag |
| | | gccgccaggaacctgggcagagtcggcaccaagtgctgcaccctgcccgaggatcagaggctgccctgtgtcgaggactacctgagcgccatc |
| | | ctgaacagagtgtgcctgctgcacgagaaaacccccgtgagcgagcacgtgaccaagtgttgcagcggcagcctggtggagcggaggccctgc |
| | | ttcagcgccctgaccgtggacgagacatacgtgcccaaagagttcaaggccgagacattcaccttccacagcgacatctgtaccctgcctgaga |
| | | aagagaagcagatcaagaagcagaccgccctggccgaactggtgaagcacaagcccaaggccaccgccgagcagctgaaaaccgtgatgga |
| | | cgacttcgcccagttcctggacacctgctgcaaggccgccgacaaggacacctgtttcagcaccgagggccccaacctggtgacccggtgcaag |
| | | gacgccctggcccaccatcatcaccatcac |
| anti- | | |
| LRP6_MOR08168 | | |
| Fab- | | |
| MSA (C:S) | | |
| MORO06475- | | |
| scFv | | |
| SEQ ID NO: 241 | 8168-VL/CL | DIELTQPPSVSVAPGQTARISCSGDSLRNKVYWYQQKPGQAPVLVIYKNNRPSGIPERFSGSNSGNTATLTISGTQA |
| | | EDEADYYCQSYDGQKSLVFGGGTKLTVLGQPKAAPSVTLFPPSSEELQANKATLVCLISDFYPGAVTVAWKADSSP |
| | | VKAGVETTTPSKQSNNKYAASSYLSLTPEQWKSHRSYSCQVTHEGSTVEKTVAPTECS |
| SEQ ID NO: 242 | 8168-VL/CL- | GACATCGAGCTGACCCAGCCCCCTTCTGTGTCTGTGGCCCCTGGCCAGACCGCCAGAATCAGCTGCAGCGGC |
| | DNA | GACAGCCTGCGGAACAAGGTGTACTGGTATCAGCAGAAGCCCGGCCAGGCTCCCGTGCTGGTGATCTACAAG |
| | | AACAACCGGCCCAGCGGCATCCCTGAGCGGTTCAGCGGCAGCAACAGCGGCAATACCGCCACCCTGACCATC |
| | | AGCGGCACCCAGGCCGAAGATGAGGCCGACTACTACTGCCAGAGCTACGACGGCCAGAAAAGCCTGGTGTT |
| | | CGGCGGAGGCACCAAGCTTACCGTGCTGGGCCAGCCCAAAGCCGCCCCTAGCGTGACCCTGTTCCCCCCCAG |
| | | CAGCGAGGAACTGCAGGCCAACAAGGCCACCCTGGTCTGCCTGATCAGCGACTTCTACCCTGGCGCCGTGAC |
| | | CGTGGCCTGGAAGGCCGACAGCAGCCCCGTGAAGGCCGGCGTGGAGACAACCACCCCCAGCAAGCAGAGCA |
| | | ACAACAAGTACGCCGCCAGCAGCTACCTGAGCCTGACCCCCGAGCAGTGGAAGAGCCACAGAAGCTACAGCT |
| | | GCCAGGTCACCCACGAGGGCAGCACCGTGGAGAAAACCGTGGCCCCCACCGAGTGCAGC |
| SEQ ID NO: 243 | 8168-VH/CH1- | QVQLVESGGGLVQPGGSLRLSCAASGFTFSDYVINWVRQAPGKGLEWVSGISWSGVNTHYADSVKGRFTISRDN |
| | MSA-(C:S)- | SKNTLYLQMNSLRAEDTAVYYCARLGATANNIRYKFMDVWGQGTLVTVSSASTKGPSVFPLAPSSKSTSGGTAAL |
| | 6475-scFv | GCLVKDYFPEPVTVSWNSGALTSGVHTFPAVLQSSGLYSLSSVVTVPSSSLGTQTYICNVNHKPSNTKVDKKVEPKS |
| | | CDKTHTEAHKSEIAHRYNDLGEQHFKGLVLIAFSQYLQKSSYDEHAKLVQEVTDFAKTCVADESAANCDKSLHTLFG |
| | | DKLCAIPNLRENYGELADCCTKQEPERNECFLQHKDDNPSLPPFERPEAEAMCTSFKENPTTFMGHYLHEVARRHP |
| | | YFYAPELLYYAEQYNEILTQCCAEADKESCLTPKLDGVKEKALVSSVRQRMKCSSMQKFGERAFKAWAVARLSQTF |
| | | PNADFAEITKLATDLTKVNKECCHGDLLECADDRAELAKYMCENQATISSKLQTCCDKPLLKKAHCLSEVEHDTMP |
| | | ADLPAIAADFVEDQEVCKNYAEAKDVFLGTFLYEYSRRHPDYSVSLLLRLAKKYEATLEKCCAEANPPACYGTVLAEF |
| | | QPLVEEPKNLVKTNCDLYEKLGEYGFQNAILVRYTQKAPQVSTPTLVEAARNLGRVGTKCCTLPEDQRLPCVEDYLS |
| | | AILNRVCLLHEKTPVSEHVTKCCSGSLVERRPCFSALTVDETYVPKEFKAETFTFHSDICTLPEKEKQIKKQTALAELVK |
| | | HKPKATAEQLKTVMDDFAQFLDTCCKAADKDTCFSTEGPNLVTRSKDALAGGSGGSDIVLTQSPATLSLSPGERAT |
| | | LSCRASQFIGSRYLAWYQQKPGQAPRLLIYGASNRATGVPARFSGSGSGTDFTLTISSLEPEDFATYYCQQYYDYPQ |
| | | TFGQGTKVEIKGGGGSGGGGSGGGGSGGGGSQVQLKESGPALVKPTQTLTLTCTFSGFSLSNRGGGVGWIRQPP |
| | | GKALEWLAWIDWDDDKSYSTSLKTRLTISKDTSKNQVVLTMTNMDPVDTATYYCARMHLPLVFDSWGQGTLVT |
| | | VSS |
| SEQ ID NO: 244 | 8168-VH/CH1- | CAGGTGCAATTGGTCGAGTCTGGCGGAGGACTGGTGCAGCCTGGTGGCAGCCTGAGACTGAGCTGCGCCGC |
| | MSA-(C:S)- | CAGCGGCTTCACCTTCAGCGACTACGTGATCAACTGGGTGCGACAGGCCCCTGGAAAGGGCCTGGAATGGGT |
| | 6475-scFv- | GTCCGGCATCTCTTGGTCTGGCGTGAACACCCACTACGCCGACAGCGTGAAGGGCCGGTTCACCATCAGCCG |
| | DNA | GGACAACAGCAAGAACACCCTGTACCTGCAGATGAACAGCCTGAGAGCCGAGGACACCGCCGTGTACTACTG |
| | | TGCCAGACTGGGCGCCACCGCCAACAACATCCGGTACAAGTTCATGGACGTGTGGGGCCAGGGCACACTTGT |
| | | GACCGTCAGCTCAGCTAGCACCAAGGGCCCCAGCGTGTTCCCCCTGGCCCCCAGCAGCAAGAGCACCTCTGG |
| | | CGGCACTGCTGCCCTGGGCTGCCTGGTCAAGGACTACTTCCCCGAGCCCGTGACAGTGTCCTGGAACAGCGG |
| | | AGCCCTGACCTCCGGCGTGCACACCTTCCCCGCCGTGCTGCAGAGCAGCGGCCTGTACAGCCTGAGCAGCGT |
| | | GGTCACAGTGCCCAGCAGCAGCCTGGGCACCCAGACCTACATCTGCAACGTGAACCACAAGCCCAGCAACAC |
| | | CAAGGTCGACAAGAAGGTGGAGCCCAAGAGCTGCGACAAGACCCACACCGAGGCCCACAAGAGCGAGATCG |
| | | CCCACCGGTACAACGACCTGGGAGAGCAGCATTTCAAGGGACTGGTGCTGATCGCCTTCAGCCAGTACCTGC |
| | | AGAAGTCCAGCTACGACGAGCACGCCAAGCTGGTGCAGGAAGTGACCGACTTCGCCAAGACCTGCGTGGCC |
| | | GACGAGAGCGCCGCCAACTGCGACAAGAGCCTGCACACCCTGTTCGGCGACAAGCTGTGCGCCATCCCCAAC |
| | | CTGCGGGAGAACTACGGCGAGCTGGCCGACTGCTGCACCAAGCAGGAACCCGAGCGGAACGAGTGCTTCCT |
| | | GCAGCACAAGGACGACAACCCCAGCCTGCCCCCCTTCGAGAGGCCTGAGGCCGAGGCCATGTGCACCAGCTT |
| | | CAAAGAGAACCCCACCACCTTCATGGGCCACTACCTGCACGAGGTGGCCAGGCGGCACCCCTACTTCTACGCC |
| | | CCCGAGCTGCTGTACTACGCCGAGCAGTACAACGAGATCCTGACCCAGTGCTGCGCCGAGGCCGACAAAGAG |
| | | AGCTGCCTGACCCCCAAGCTGGACGGCGTGAAAGAAAAGGCCCTGGTGTCCAGCGTGCGGCAGCGGATGAA |
| | | GTGCAGCAGCATGCAGAAGTTCGGCGAGCGGGCCTTCAAGGCCTGGGCCGTGGCCCGGCTGTCCCAGACCTT |
| | | CCCCAACGCCGATTTCGCCGAGATCACCAAGCTGGCCACCGACCTGACCAAGGTGAACAAAGAGTGCTGTCA |
| | | CGGCGACCTGCTGGAATGCGCCGACGACCGGGCCGAGCTGGCCAAGTACATGTGCGAGAACCAGGCCACCA |
| | | TCAGCTCCAAACTGCAGACCTGCTGTGATAAGCCCCTGCTGAAGAAGGCCCACTGCCTGAGCGAGGTGGAGC |
| | | ACGACACCATGCCCGCCGACCTGCCCGCCATTGCCGCCGACTTCGTGGAGGACCAGGAAGTGTGCAAGAATT |
| | | ACGCCGAGGCCAAGGACGTGTTCCTGGGCACCTTCCTGTACGAGTACAGCAGACGGCACCCCGACTACAGCG |
| | | TGAGCCTGCTGCTGAGGCTGGCCAAGAAGTACGAGGCCACCCTGGAAAAGTGTTGCGCCGAAGCCAACCCCC |
| | | CTGCCTGCTACGGCACCGTGCTGGCCGAGTTCCAGCCCCTGGTGGAGGAACCCAAGAACCTGGTGAAAACCA |
| | | ACTGCGATCTGTACGAGAAGCTGGGCGAGTACGGCTTCCAGAACGCCATCCTGGTCCGGTACACCCAGAAAG |
| | | CCCCCCAGGTGTCCACCCCCACACTGGTGGAGGCCGCCAGGAACCTGGGCAGAGTCGGCACCAAGTGCTGCA |
| | | CCCTGCCCGAGGATCAGAGGCTGCCCTGTGTCGAGGACTACCTGAGCGCCATCCTGAACAGAGTGTGCCTGC |
| | | TGCACGAGAAAACCCCCGTGAGCGAGCACGTGACCAAGTGTTGCAGCGGCAGCCTGGTGGAGCGGAGGCCC |
| | | TGCTTCAGCGCCCTGACCGTGGACGAGACATACGTGCCCAAAGAGTTCAAGGCCGAGACATTCACCTTCCACA |
| | | GCGACATCTGTACCCTGCCTGAGAAAGAGAAGCAGATCAAGAAGCAGACCGCCCTGGCCGAACTGGTGAAG |
| | | CACAAGCCCAAGGCCACCGCCGAGCAGCTGAAAACCGTGATGGACGACTTCGCCCAGTTCCTGGACACCTGC |
| | | TGCAAGGCCGCCGACAAGGACACCTGTTTCAGCACCGAGGGCCCCAACCTGGTGACCCGGTCCAAGGACGCC |
| | | CTGGCCGGCGGCTCCGGCGGAAGCGATATCGTGCTGACACAGAGCCCTGCCACCCTGTCTCTGAGCCCTGGC |
| | | GAGAGAGCCACCCTGAGCTGCCGGGCCAGCCAGTTCATCGGCTCCCGCTACCTGGCCTGGTATCAGCAGAAG |
| | | CCCGGACAGGCTCCCAGACTGCTGATCTACGGCGCCAGCAACAGAGCTACCGGCGTGCCCGCCAGATTTTCT |
| | | GGCAGCGGCAGCGGCACCGACTTCACCCTGACCATCAGCAGCCTGGAACCCGAGGACTTCGCCACCTACTAC |
| | | TGCCAGCAGTACTACGACTACCCCCAGACCTTCGGCCAGGGCACCAAGGTGGAGATCAAGGGCGGAGGCGG |
| | | ATCCGGGGGTGGCGGAAGTGGAGGCGGAGGAAGCGGAGGGGGCGGAAGCCAGGTGCAATTGAAAGAGTC |
| | | CGGCCCTGCCCTGGTGAAGCCTACCCAGACCCTGACCCTGACATGCACCTTCAGCGGCTTCAGCCTGAGCAAC |
| | | AGAGGCGGCGGAGTGGGCTGGATCAGACAGCCTCCCGGCAAGGCCCTGGAATGGCTGGCCTGGATCGACTG |
| | | GGACGACGACAAGAGCTACAGCACCAGCCTGAAAACCCGGCTGACCATCTCCAAGGACACCAGCAAGAACCA |
| | | GGTGGTGCTCACCATGACCAACATGGACCCCGTGGACACCGCCACCTATTATTGCGCCCGGATGCATCTGCCC |
| | | CTGGTGTTCGATAGCTGGGGCCAGGGAACCCTGGTGACAGTGTCCAGC |
| anti- | | |
| LRP6_MOR08168 | | |
| Fab- | | |
| HSA (C:S) | | |
| MOR06475- | | |
| scFv | | |
| SEQ ID NO: 245 | 8168-VL/CL | DIELTQPPSVSVAPGQTARISCSGDSLRNKVYWYQQKPGQAPVLVIYKNNRPSGIPERFSGSNSGNTATLTISGTQA |
| | | EDEADYYCQSYDGQKSLVFGGGTKLTVLGQPKAAPSVTLFPPSSEELQANKATLVCLISDFYPGAVTVAWKADSSP |
| | | VKAGVETTTPSKQSNNKYAASSYLSLTPEQWKSHRSYSCQVTHEGSTVEKTVAPTECS |
| SEQ ID NO: 246 | 8168-VL/CL- | GACATCGAGCTGACCCAGCCCCCTTCTGTGTCTGTGGCCCCTGGCCAGACCGCCAGAATCAGCTGCAGCGGC |
| | DNA | GACAGCCTGCGGAACAAGGTGTACTGGTATCAGCAGAAGCCCGGCCAGGCTCCCGTGCTGGTGATCTACAAG |
| | | AACAACCGGCCCAGCGGCATCCCTGAGCGGTTCAGCGGCAGCAACAGCGGCAATACCGCCACCCTGACCATC |
| | | AGCGGCACCCAGGCCGAAGATGAGGCCGACTACTACTGCCAGAGCTACGACGGCCAGAAAAGCCTGGTGTT |
| | | CGGCGGAGGCACCAAGCTTACCGTGCTGGGCCAGCCCAAAGCCGCCCCTAGCGTGACCCTGTTCCCCCCCAG |
| | | CAGCGAGGAACTGCAGGCCAACAAGGCCACCCTGGTCTGCCTGATCAGCGACTTCTACCCTGGCGCCGTGAC |
| | | CGTGGCCTGGAAGGCCGACAGCAGCCCCGTGAAGGCCGGCGTGGAGACAACCACCCCCAGCAAGCAGAGCA |
| | | ACAACAAGTACGCCGCCAGCAGCTACCTGAGCCTGACCCCCGAGCAGTGGAAGAGCCACAGAAGCTACAGCT |
| | | GCCAGGTCACCCACGAGGGCAGCACCGTGGAGAAAACCGTGGCCCCCACCGAGTGCAGC |
| SEQ ID NO: 247 | 8168-VH/CH1- | QVQLVESGGGLVQPGGSLRLSCAASGFTFSDYVINWVRQAPGKGLEWVSGISWSGVNTHYADSVKGRFTISRDN |
| | HSA-(C:S)- | SKNTLYLQMNSLRAEDTAVYYCARLGATANNIRYKFMDVWGQGTLVTVSSASTKGPSVFPLAPSSKSTSGGTAAL |
| | 6475-scFv | GCLVKDYFPEPVTVSWNSGALTSGVHTFPAVLQSSGLYSLSSVVTVPSSSLGTQTYICNVNHKPSNTKVDKKVEPKS |
| | | CDKTHTDAHKSEVAHRFKDLGEENFKALVLIAFAQYLQQSPFEDHVKLVNEVTEFAKTCVADESAENCDKSLHTLF |
| | | GDKLCTVATLRETYGEMADCCAKQEPERNECFLQHKDDNPNLPRLVRPEVDVMCTAFHDNEETFLKKYLYEIARR |
| | | HPYFYAPELLFFAKRYKAAFTECCQAADKAACLLPKLDELRDEGKASSAKQRLKCASLQKFGERAFKAWAVARLSQ |
| | | RFPKAEFAEVSKLVTDLTKVHTECCHGDLLECADDRADLAKYICENQDSISSKLKECCEKPLLEKSHCIAEVENDEMP |
| | | ADLPSLAADFVESKDVCKNYAEAKDVFLGMFLYEYARRHPDYSVVLLLRLAKTYETTLEKCCAAADPHECYAKVFDE |
| | | FKPLVEEPQNLIKQNCELFEQLGEYKFQNALLVRYTKKVPQVSTPTLVEVSRNLGKVGSKCCKHPEAKRMPCAEDYL |
| | | SVVLNQLCVLHEKTPVSDRVTKCCTESLVNRRPCFSALEVDETYVPKEFNAETFTFHADICTLSEKERQIKKQTALVEL |
| | | VKHKPKATKEQLKAVMDDFAAFVEKCCKADDKETCFAEEGKKLVAASQAALGLGGSGGSDIVLTQSPATLSLSPGE |
| | | RATLSCRASQFIGSRYLAWYQQKPGQAPRLLIYGASNRATGVPARFSGSGSGTDFTLTISSLEPEDFATYYCQQYYD |
| | | YPQTFGQGTKVEIKGGGGSGGGGSGGGGSGGGGSQVQLKESGPALVKPTQTLTLTCTFSGFSLSNRGGGVGWIR |
| | | QPPGKALEWLAWIDWDDDKSYSTSLKTRLTISKDTSKNQVVLTMTNMDPVDTATYYCARMHLPLVFDSWGQGT |
| | | LVTVSS |
| SEQ ID NO: 248 | 8168-VH/CH1- | CAGGTGCAATTGGTCGAGTCTGGCGGAGGACTGGTGCAGCCTGGTGGCAGCCTGAGACTGAGCTGCGCCGC |
| | HSA-(C:S)- | CAGCGGCTTCACCTTCAGCGACTACGTGATCAACTGGGTGCGACAGGCCCCTGGAAAGGGCCTGGAATGGGT |
| | 6475-scFv- | GTCCGGCATCTCTTGGTCTGGCGTGAACACCCACTACGCCGACAGCGTGAAGGGCCGGTTCACCATCAGCCG |
| | DNA | GGACAACAGCAAGAACACCCTGTACCTGCAGATGAACAGCCTGAGAGCCGAGGACACCGCCGTGTACTACTG |
| | | TGCCAGACTGGGCGCCACCGCCAACAACATCCGGTACAAGTTCATGGACGTGTGGGGCCAGGGCACACTGGT |
| | | GACCGTCAGCTCAGCTAGCACCAAGGGCCCCAGCGTGTTCCCCCTGGCCCCCTCCAGCAAGTCCACAAGCGGT |
| | | GGCACAGCAGCTCTGGGTTGCCTGGTGAAGGACTACTTCCCCGAGCCCGTGACAGTGTCCTGGAACTCTGGC |
| | | GCCCTGACCTCCGGCGTGCACACCTTCCCCGCCGTGCTGCAGAGCAGCGGCCTGTACAGCCTGAGCAGCGTG |
| | | GTGACAGTCCCCAGCAGCAGCTTGGGCACCCAGACCTACATCTGCAACGTGAACCACAAGCCCAGCAACACC |
| | | AAGGTGGACAAGAAGGTGGAGCCCAAGAGCTGCGACAAGACCCACACCGACGCCCACAAGAGCGAGGTGG |
| | | CCCACCGGTTCAAGGACCTGGGCGAGGAAAACTTCAAGGCCCTGGTGCTGATCGCCTTCGCCCAGTACCTGC |
| | | AGCAGAGCCCCTTCGAAGATCACGTAAAGTTAGTCAACGAGGTTACGGAATTCGCAAAGACATGCGTTGCTG |
| | | ACGAATCCGCTGAGAATTGTGACAAGAGTTTGCACACTTTATTCGGAGATAAGTTGTGTACTGTAGCTACTTT |
| | | GAGAGAGACTTACGGTGAAATGGCTGACTGCTGTGCAAAACAGGAACCAGAACGTAACGAATGTTTCCTTCA |
| | | GCATAAGGATGATAACCCTAACCTTCCAAGGCTTGTTAGGCCAGAAGTCGACGTGATGTGCACCGCCTTCCAT |
| | | GATAATGAAGAGACTTTTCTTAAAAAGTACCTATACGAGATTGCAAGGCGTCATCCATATTTTTACGCCCCAGA |
| | | GCTGTTGTTTTTCGCAAAGAGATACAAAGCTGCATTTACTGAGTGTTGCCAAGCTGCCGACAAGGCCGCTTGT |
| | | TTGCTACCAAAGTTGGACGAATTGAGAGACGAGGGTAAGGCATCATCTGCCAAGCAGAGATTAAAATGTGCA |
| | | TCTTTGCAAAAATTTGGAGAGAGAGCTTTTAAGGCATGGGCTGTTGCCCGACTAAGCCAAAGATTCCCAAAAG |
| | | CCGAATTTGCTGAAGTATCCAAGCTGGTGACTGATTTGACTAAAGTACATACAGAATGTTGCCATGGCGACCT |
| | | TTTAGAATGTGCTGATGACAGAGCAGATTTGGCTAAGTATATCTGCGAAAATCAAGATTCAATCAGCTCTAAG |
| | | CTGAAGGAATGTTGCGAGAAACCACTGTTAGAAAAATCGCATTGTATTGCTGAAGTTGAAAATGATGAGATG |
| | | CCTGCTGACTTGCCTTCTCTTGCCGCTGATTTTGTTGAGTCGAAGGATGTCTGTAAGAATTATGCTGAAGCTAA |
| | | AGACGTTTTCCTGGGTATGTTCTTATATGAGTACGCAAGACGTCACCCAGATTACTCTGTGGTTCTGCTACTGA |
| | | GATTGGCTAAAACATACGAGACAACGCTGGAGAAGTGCTGTGCTGCCGCTGACCCTCATGAGTGCTATGCAA |
| | | AGGTTTTTGATGAATTCAAACCATTGGTTGAAGAGCCTCAAAACTTGATAAAGCAGAACTGTGAGCTGTTTGA |
| | | GCAATTGGGTGAGTATAAGTTCCAAAATGCCCTGTTGGTGAGATATACAAAAAAGGTACCCCAAGTTTCAACG |
| | | CCCACTTTAGTTGAAGTGTCCAGAAATCTTGGTAAAGTGGGTAGCAAATGTTGCAAGCATCCAGAAGCCAAG |
| | | CGAATGCCCTGTGCTGAGGATTATCTGTCCGTCGTGTTGAACCAATTGTGCGTATTACACGAAAAAACCCCAG |
| | | TCTCTGATAGAGTCACCAAATGTTGCACTGAGTCACTAGTTAATAGAAGGCCTTGTTTTTCCGCTTTGGAAGTT |
| | | GATGAAACCTACGTGCCTAAGGAATTTAACGCTGAGACCTTTACCTTTCACGCTGACATTTGTACTTTGAGTGA |
| | | AAAAGAGCGTCAAATCAAAAAGCAAACCGCTCTTGTTGAATTGGTGAAACACAAGCCTAAGGCTACGAAGGA |
| | | GCAGCTTAAAGCCGTCATGGACGATTTCGCCGCATTTGTTGAAAAATGCTGTAAAGCTGATGACAAGGAAAC |
| | | ATGTTTCGCTGAAGAGGGAAAGAAATTGGTTGCGGCCAGTCAGGCAGCGCTTGGTTTGGGCGGCTCCGGCG |
| | | GAAGCGATATCGTGCTGACACAGAGCCCTGCCACCCTGTCTCTGAGCCCTGGCGAGAGAGCCACCCTGAGCT |
| | | GCCGGGCCAGCCAGTTCATCGGCTCCCGCTACCTGGCCTGGTATCAGCAGAAGCCCGGACAGGCTCCCAGAC |
| | | TGCTGATCTACGGCGCCAGCAACAGAGCTACCGGCGTGCCCGCCAGATTTTCTGGCAGCGGCAGCGGCACCG |
| | | ACTTCACCCTGACCATCAGCAGCCTGGAACCCGAGGACTTCGCCACCTACTACTGCCAGCAGTACTACGACTA |
| | | CCCCCAGACCTTCGGCCAGGGCACCAAGGTGGAGATCAAGGGCGGAGGCGGATCCGGGGGTGGCGGAAGT |
| | | GGAGGCGGAGGAAGCGGAGGGGGCGGAAGCCAGGTGCAATTGAAAGAGTCCGGCCCTGCCCTGGTGAAGC |
| | | CTACCCAGACCCTGACCCTGACATGCACCTTCAGCGGCTTCAGCCTGAGCAACAGAGGCGGCGGAGTGGGCT |
| | | GGATCAGACAGCCTCCCGGCAAGGCCCTGGAATGGCTGGCCTGGATCGACTGGGACGACGACAAGAGCTAC |
| | | AGCACCAGCCTGAAAACCCGGCTGACCATCTCCAAGGACACCAGCAAGAACCAGGTGGTGCTCACCATGACC |
| | | AACATGGACCCCGTGGACACCGCCACCTATTATTGCGCCCGGATGCATCTGCCCCTGGTGTTCGATAGCTGGG |
| | | GCCAGGGAACCCTGGTGACAGTGTCCAGC |
| anti- | | |
| LRP6_MOR08168 | | |
| Fab- | | |
| HSA (C:S) | | |
| MOR06475- | | |
| scFab | | |
| SEQ ID NO: 249 | 8168-VL/CL | DIELTQPPSVSVAPGQTARISCSGDSLRNKVYWYQQKPGQAPVLVIYKNNRPSGIPERFSGSNSGNTATLTISGTQA |
| | | EDEADYYCQSYDGQKSLVFGGGTKLTVLGQPKAAPSVTLFPPSSEELQANKATLVCLISDFYPGAVTVAWKADSSP |
| | | VKAGVETTTPSKQSNNKYAASSYLSLTPEQWKSHRSYSCQVTHEGSTVEKTVAPTECS |
| SEQ ID NO: 250 | 8168-VL/CL- | GACATCGAGCTGACCCAGCCCCCTTCTGTGTCTGTGGCCCCTGGCCAGACCGCCAGAATCAGCTGCAGCGGC |
| | DNA | GACAGCCTGCGGAACAAGGTGTACTGGTATCAGCAGAAGCCCGGCCAGGCTCCCGTGCTGGTGATCTACAAG |
| | | AACAACCGGCCCAGCGGCATCCCTGAGCGGTTCAGCGGCAGCAACAGCGGCAATACCGCCACCCTGACCATC |
| | | AGCGGCACCCAGGCCGAAGATGAGGCCGACTACTACTGCCAGAGCTACGACGGCCAGAAAAGCCTGGTGTT |
| | | CGGCGGAGGCACCAAGCTTACCGTGCTGGGCCAGCCCAAAGCCGCCCCTAGCGTGACCCTGTTCCCCCCCAG |
| | | CAGCGAGGAACTGCAGGCCAACAAGGCCACCCTGGTCTGCCTGATCAGCGACTTCTACCCTGGCGCCGTGAC |
| | | CGTGGCCTGGAAGGCCGACAGCAGCCCCGTGAAGGCCGGCGTGGAGACAACCACCCCCAGCAAGCAGAGCA |
| | | ACAACAAGTACGCCGCCAGCAGCTACCTGAGCCTGACCCCCGAGCAGTGGAAGAGCCACAGAAGCTACAGCT |
| | | GCCAGGTCACCCACGAGGGCAGCACCGTGGAGAAAACCGTGGCCCCCACCGAGTGCAGC |
| SEQ ID NO: 251 | 8168-VH/CH1- | QVQLVESGGGLVQPGGSLRLSCAASGFTFSDYVINWVRQAPGKGLEWVSGISWSGVNTHYADSVKGRFTISRDN |
| | HSA-(C:S)- | SKNTLYLQMNSLRAEDTAVYYCARLGATANNIRYKFMDVWGQGTLVTVSSASTKGPSVFPLAPSSKSTSGGTAAL |
| | 6475-scFab | GCLVKDYFPEPVTVSWNSGALTSGVHTFPAVLQSSGLYSLSSVVTVPSSSLGTQTYICNVNHKPSNTKVDKKVEPKS |
| | | CDKTHTDAHKSEVAHRFKDLGEENFKALVLIAFAQYLQQSPFEDHVKLVNEVTEFAKTCVADESAENCDKSLHTLF |
| | | GDKLCTVATLRETYGEMADCCAKQEPERNECFLQHKDDNPNLPRLVRPEVDVMCTAFHDNEETFLKKYLYEIARR |
| | | HPYFYAPELLFFAKRYKAAFTECCQAADKAACLLPKLDELRDEGKASSAKQRLKCASLQKFGERAFKAWAVARLSQ |
| | | RFPKAEFAEVSKLVTDLTKVHTECCHGDLLECADDRADLAKYICENQDSISSKLKECCEKPLLEKSHCIAEVENDEMP |
| | | ADLPSLAADFVESKDVCKNYAEAKDVFLGMFLYEYARRHPDYSVVLLLRLAKTYETTLEKCCAAADPHECYAKVFDE |
| | | FKPLVEEPQNLIKQNCELFEQLGEYKFQNALLVRYTKKVPQVSTPTLVEVSRNLGKVGSKCCKHPEAKRMPCAEDYL |
| | | SVVLNQLCVLHEKTPVSDRVTKCCTESLVNRRPCFSALEVDETYVPKEFNAETFTFHADICTLSEKERQIKKQTALVEL |
| | | VKHKPKATKEQLKAVMDDFAAFVEKCCKADDKETCFAEEGKKLVAASQAALGLGGSGGSDIVLTQSPATLSLSPGE |
| | | RATLSCRASQFIGSRYLAWYQQKPGQAPRLLIYGASNRATGVPARFSGSGSGTDFTLTISSLEPEDFATYYCQQYYD |
| | | YPQTFGQGTKVEIKRTVAAPSVFIFPPSDEQLKSGTASVVCLLNNFYPREAKVQWKVDNALQSGNSQESVTEQDSK |
| | | DSTYSLSSTLTLSKADYEKHKVYACEVTHQGLSSPVTKSFNRGECGGGGSGGGGSGGGGSGGGGSGGGGSGGGG |
| | | SQVQLKESGPALVKPTQTLTLTCTFSGFSLSNRGGGVGWIRQPPGKALEWLAWIDWDDDKSYSTSLKTRLTISKDT |
| | | SKNQVVLTMTNMDPVDTATYYCARMHLPLVFDSWGQGTLVTVSSASTKGPSVFPLAPSSKSTSGGTAALGCLVK |
| | | DYFPEPVTVSWNSGALTSGVHTFPAVLQSSGLYSLSSVVTVPSSSLGTQTYICNVNHKPSNTKVDKRVEPKSC |
| SEQ ID NO: 252 | 8168-VH/CH1- | CAGGTGCAATTGGTCGAGTCTGGCGGAGGACTGGTGCAGCCTGGTGGCAGCCTGAGACTGAGCTGCGCCGC |
| | HSA-(C:S)- | CAGCGGCTTCACCTTCAGCGACTACGTGATCAACTGGGTGCGACAGGCCCCTGGAAAGGGCCTGGAATGGGT |
| | 6475-scFab- | GTCCGGCATCTCTTGGTCTGGCGTGAACACCCACTACGCCGACAGCGTGAAGGGCCGGTTCACCATCAGCCG |
| | DNA | GGACAACAGCAAGAACACCCTGTACCTGCAGATGAACAGCCTGAGAGCCGAGGACACCGCCGTGTACTACTG |
| | | TGCCAGACTGGGCGCCACCGCCAACAACATCCGGTACAAGTTCATGGACGTGTGGGGCCAGGGCACACTGGT |
| | | GACCGTCAGCTCAGCTAGCACCAAGGGCCCCAGCGTGTTCCCCCTGGCCCCCTCCAGCAAGTCCACAAGCGGT |
| | | GGCACAGCAGCTCTGGGTTGCCTGGTGAAGGACTACTTCCCCGAGCCCGTGACAGTGTCCTGGAACTCTGGC |
| | | GCCCTGACCTCCGGCGTGCACACCTTCCCCGCCGTGCTGCAGAGCAGCGGCCTGTACAGCCTGAGCAGCGTG |
| | | GTGACAGTCCCCAGCAGCAGCTTGGGCACCCAGACCTACATCTGCAACGTGAACCACAAGCCCAGCAACACC |
| | | AAGGTGGACAAGAAGGTGGAGCCCAAGAGCTGCGACAAGACCCACACCGACGCCCACAAGAGCGAGGTGG |
| | | CCCACCGGTTCAAGGACCTGGGCGAGGAAAACTTCAAGGCCCTGGTGCTGATCGCCTTCGCCCAGTACCTGC |
| | | AGCAGAGCCCCTTCGAAGATCACGTAAAGTTAGTCAACGAGGTTACGGAATTCGCAAAGACATGCGTTGCTG |
| | | ACGAATCCGCTGAGAATTGTGACAAGAGTTTGCACACTTTATTCGGAGATAAGTTGTGTACTGTAGCTACTTT |
| | | GAGAGAGACTTACGGTGAAATGGCTGACTGCTGTGCAAAACAGGAACCAGAACGTAACGAATGTTTCCTTCA |
| | | GCATAAGGATGATAACCCTAACCTTCCAAGGCTTGTTAGGCCAGAAGTCGACGTGATGTGCACCGCCTTCCAT |
| | | GATAATGAAGAGACTTTTCTTAAAAAGTACCTATACGAGATTGCAAGGCGTCATCCATATTTTTACGCCCCAGA |
| | | GCTGTTGTTTTTCGCAAAGAGATACAAAGCTGCATTTACTGAGTGTTGCCAAGCTGCCGACAAGGCCGCTTGT |
| | | TTGCTACCAAAGTTGGACGAATTGAGAGACGAGGGTAAGGCATCATCTGCCAAGCAGAGATTAAAATGTGCA |
| | | TCTTTGCAAAAATTTGGAGAGAGAGCTTTTAAGGCATGGGCTGTTGCCCGACTAAGCCAAAGATTCCCAAAAG |
| | | CCGAATTTGCTGAAGTATCCAAGCTGGTGACTGATTTGACTAAAGTACATACAGAATGTTGCCATGGCGACCT |
| | | TTTAGAATGTGCTGATGACAGAGCAGATTTGGCTAAGTATATCTGCGAAAATCAAGATTCAATCAGCTCTAAG |
| | | CTGAAGGAATGTTGCGAGAAACCACTGTTAGAAAAATCGCATTGTATTGCTGAAGTTGAAAATGATGAGATG |
| | | CCTGCTGACTTGCCTTCTCTTGCCGCTGATTTTGTTGAGTCGAAGGATGTCTGTAAGAATTATGCTGAAGCTAA |
| | | AGACGTTTTCCTGGGTATGTTCTTATATGAGTACGCAAGACGTCACCCAGATTACTCTGTGGTTCTGCTACTGA |
| | | GATTGGCTAAAACATACGAGACAACGCTGGAGAAGTGCTGTGCTGCCGCTGACCCTCATGAGTGCTATGCAA |
| | | AGGTTTTTGATGAATTCAAACCATTGGTTGAAGAGCCTCAAAACTTGATAAAGCAGAACTGTGAGCTGTTTGA |
| | | GCAATTGGGTGAGTATAAGTTCCAAAATGCCCTGTTGGTGAGATATACAAAAAAGGTACCCCAAGTTTCAACG |
| | | CCCACTTTAGTTGAAGTGTCCAGAAATCTTGGTAAAGTGGGTAGCAAATGTTGCAAGCATCCAGAAGCCAAG |
| | | CGAATGCCCTGTGCTGAGGATTATCTGTCCGTCGTGTTGAACCAATTGTGCGTATTACACGAAAAAACCCCAG |
| | | TCTCTGATAGAGTCACCAAATGTTGCACTGAGTCACTAGTTAATAGAAGGCCTTGTTTTTCCGCTTTGGAAGTT |
| | | GATGAAACCTACGTGCCTAAGGAATTTAACGCTGAGACCTTTACCTTTCACGCTGACATTTGTACTTTGAGTGA |
| | | AAAAGAGCGTCAAATCAAAAAGCAAACCGCTCTTGTTGAATTGGTGAAACACAAGCCTAAGGCTACGAAGGA |
| | | GCAGCTTAAAGCCGTCATGGACGATTTCGCCGCATTTGTTGAAAAATGCTGTAAAGCTGATGACAAGGAAAC |
| | | ATGTTTCGCTGAAGAGGGAAAGAAATTGGTTGCGGCCAGTCAGGCAGCGCTTGGTTTGGGCGGCTCCGGCG |
| | | GAAGCGATATCGTGCTGACCCAGAGCCCGGCGACCCTGAGCCTGTCTCCGGGCGAACGTGCGACCCTGAGCT |
| | | GCAGAGCGAGCCAGTTTATTGGTTCTCGTTATCTGGCTTGGTACCAGCAGAAACCAGGTCAAGCACCGCGTCT |
| | | ATTAATTTATGGTGCTTCTAATCGTGCAACTGGGGTCCCGGCGCGTTTTAGCGGCTCTGGATCCGGCACGGAT |
| | | TTTACCCTGACCATTAGCAGCCTGGAACCTGAAGACTTTGCGACTTATTATTGCCAGCAGTATTATGATTATCC |
| | | TCAGACCTTTGGCCAGGGTACGAAAGTTGAAATTAAACGTACGGTGGCCGCTCCCAGCGTGTTCATCTTCCCC |
| | | CCCAGCGACGAGCAGCTGAAGAGCGGCACCGCCAGCGTGGTGTGCCTGCTGAACAACTTCTACCCCCGGGAG |
| | | GCCAAGGTGCAGTGGAAGGTGGACAACGCCCTGCAGAGCGGCAACAGCCAGGAGAGCGTCACCGAGCAGG |
| | | ACAGCAAGGACTCCACCTACAGCCTGAGCAGCACCCTGACCCTGAGCAAGGCCGACTACGAGAAGCATAAGG |
| | | TGTACGCCTGCGAGGTGACGCACCAGGGCCTGTCCAGCCCCGTGACCAAGAGCTTCAACAGGGGCGAGTGC |
| | | GGAGGTGGGGGATCGGGAGGAGGTGGGTCAGGTGGAGGAGGGTCAGGGGGAGGGGGCTCGGGAGGCGG |
| | | TGGCTCCGGAGGGGGTGGGAGCCAAGTGCAATTGAAAGAAAGCGGCCCGGCCCTGGTGAAACCGACCCAAA |
| | | CCCTGACCCTGACCTGTACCTTTTCCGGATTTAGCCTGTCTAATCGTGGTGGTGGTGTGGGTTGGATTCGCCAG |
| | | CCGCCTGGGAAAGCCCTCGAGTGGCTGGCTTGGATCGATTGGGATGATGATAAGTCTTATAGCACCAGCCTG |
| | | AAAACGCGTCTGACCATTAGCAAAGATACTTCGAAAAATCAGGTGGTGCTGACTATGACCAACATGGACCCG |
| | | GTGGATACGGCCACCTATTATTGCGCGCGTATGCATCTTCCTCTTGTTTTTGATTCTTGGGGCCAAGGCACCCT |
| | | GGTGACGGTTAGCTCAGCTAGCACCAAGGGCCCCAGCGTGTTCCCCCTGGCCCCCAGCAGCAAGAGCACCAG |
| | | CGGCGGCACAGCCGCCCTGGGCTGCCTGGTGAAGGACTACTTCCCCGAGCCCGTGACCGTGTCCTGGAACAG |
| | | CGGAGCCCTGACCTCCGGCGTGCACACCTTCCCCGCCGTGCTGCAGAGCAGCGGCCTGTACAGCCTGTCCAGC |
| | | GTGGTGACAGTGCCCAGCAGCAGCCTGGGCACCCAGACCTACATCTGCAACGTGAACCACAAGCCCAGCAAC |
| | | ACCAAGGTGGACAAGAGAGTGGAGCCCAAGAGCTGC |
| anti- | | |
| LRP6_MOR08168- | | |
| hIgG1LALA | | |
| (mut Hinge | | |
| F:T; Y:D) | | |
| MOR06475- | | |
| scFv | | |
| SEQ ID NO: 253 | 8168-VL/CL | DIELTQPPSVSVAPGQTARISCSGDSLRNKVYWYQQKPGQAPVLVIYKNNRPSGIPERFSGSNSGNTATLTISGTQA |
| | | EDEADYYCQSYDGQKSLVFGGGTKLTVLGQPKAAPSVTLFPPSSEELQANKATLVCLISDFYPGAVTVAWKADSSP |
| | | VKAGVETTTPSKQSNNKYAASSYLSLTPEQWKSHRSYSCQVTHEGSTVEKTVAPTECS |
| SEQ ID NO: 254 | 8168-VL/CL- | GACATCGAGCTGACCCAGCCCCCTTCTGTGTCTGTGGCCCCTGGCCAGACCGCCAGAATCAGCTGCAGCGGC |
| | DNA | GACAGCCTGCGGAACAAGGTGTACTGGTATCAGCAGAAGCCCGGCCAGGCTCCCGTGCTGGTGATCTACAAG |
| | | AACAACCGGCCCAGCGGCATCCCTGAGCGGTTCAGCGGCAGCAACAGCGGCAATACCGCCACCCTGACCATC |
| | | AGCGGCACCCAGGCCGAAGATGAGGCCGACTACTACTGCCAGAGCTACGACGGCCAGAAAAGCCTGGTGTT |
| | | CGGCGGAGGCACCAAGCTTACCGTGCTGGGCCAGCCCAAAGCCGCCCCTAGCGTGACCCTGTTCCCCCCCAG |
| | | CAGCGAGGAACTGCAGGCCAACAAGGCCACCCTGGTCTGCCTGATCAGCGACTTCTACCCTGGCGCCGTGAC |
| | | CGTGGCCTGGAAGGCCGACAGCAGCCCCGTGAAGGCCGGCGTGGAGACAACCACCCCCAGCAAGCAGAGCA |
| | | ACAACAAGTACGCCGCCAGCAGCTACCTGAGCCTGACCCCCGAGCAGTGGAAGAGCCACAGAAGCTACAGCT |
| | | GCCAGGTCACCCACGAGGGCAGCACCGTGGAGAAAACCGTGGCCCCCACCGAGTGCAGC |
| SEQ ID NO: 255 | 8168- | QVQLVESGGGLVQPGGSLRLSCAASGFTFSDYVINWVRQAPGKGLEWVSGISWSGVNTHYADSVKGRFTISRDN |
| | hIgG1LALA- | SKNTLYLQMNSLRAEDTAVYYCARLGATANNIRYKFMDVWGQGTLVTVSSASTKGPSVFPLAPSSKSTSGGTAAL |
| | (mut-Hinge- | GCLVKDYFPEPVTVSWNSGALTSGVHTFPAVLQSSGLYSLSSVVTVPSSSLGTQTYICNVNHKPSNTKVDKRVEPKS |
| | F:T; Y:D)-6475- | CDKTHTGPPGPAPEAAGGPSVFLFPPKPKDTLMISRTPEVTCVVVDVSHEDPEVKFNWYVDGVEVHNAKTKPREE |
| | scFv | QYNSTYRVVSVLTVLHQDWLNGKEYKCKVSNKALPAPIEKTISKAKGQPREPQVYTLPPSREEMTKNQVSLTCLVK |
| | | GFYPSDIAVEWESNGQPENNYKTTPPVLDSDGSFTLDSKLTVDKSRWQQGNVFSCSVMHEALHNHYTQKSLSLSP |
| | | GKGGSGGSDIVLTQSPATLSLSPGERATLSCRASQFIGSRYLAWYQQKPGQAPRLLIYGASNRATGVPARFSGSGSG |
| | | TDFTLTISSLEPEDFATYYCQQYYDYPQTFGQGTKVEIKGGGGSGGGGSGGGGSGGGGSQVQLKESGPALVKPTQ |
| | | TLTLTCTFSGFSLSNRGGGVGWIRQPPGKALEWLAWIDWDDDKSYSTSLKTRLTISKDTSKNQVVLTMTNMDPV |
| | | DTATYYCARMHLPLVFDSWGQGTLVTVSS |
| SEQ ID NO: 256 | 8168- | CAGGTGCAATTGGTCGAGTCTGGCGGAGGACTGGTGCAGCCTGGTGGCAGCCTGAGACTGAGCTGCGCCGC |
| | hIgG1LALA- | CAGCGGCTTCACCTTCAGCGACTACGTGATCAACTGGGTGCGACAGGCCCCTGGAAAGGGCCTGGAATGGGT |
| | (mut-Hinge- | GTCCGGCATCTCTTGGTCTGGCGTGAACACCCACTACGCCGACAGCGTGAAGGGCCGGTTCACCATCAGCCG |
| | F:T; Y:D)-6475- | GGACAACAGCAAGAACACCCTGTACCTGCAGATGAACAGCCTGAGAGCCGAGGACACCGCCGTGTACTACTG |
| | scFv-DNA | TGCCAGACTGGGCGCCACCGCCAACAACATCCGGTACAAGTTCATGGACGTGTGGGGCCAGGGCACACTGGT |
| | | GACCGTCAGCTCAGCTAGCACCAAGGGCCCCAGCGTGTTCCCCCTGGCCCCCAGCAGCAAGAGCACCAGCGG |
| | | CGGCACAGCCGCCCTGGGCTGCCTGGTGAAGGACTACTTCCCCGAGCCCGTGACCGTGTCCTGGAACAGCGG |
| | | AGCCCTGACCTCCGGCGTGCACACCTTCCCCGCCGTGCTGCAGAGCAGCGGCCTGTACAGCCTGTCCAGCGTG |
| | | GTGACAGTGCCCAGCAGCAGCCTGGGCACCCAGACCTACATCTGCAACGTGAACCACAAGCCCAGCAACACC |
| | | AAGGTGGACAAGAGAGTGGAGCCCAAGAGCTGCGACAAGACCCACACCGGCCCCCCCGGCCCAGCCCCAGA |
| | | GGCAGCGGGCGGACCCTCCGTGTTCCTGTTCCCCCCCAAGCCCAAGGACACCCTGATGATCAGCAGGACCCCC |
| | | GAGGTGACCTGCGTGGTGGTGGACGTGAGCCACGAGGACCCAGAGGTGAAGTTCAACTGGTACGTGGACGG |
| | | CGTGGAGGTGCACAACGCCAAGACCAAGCCCAGAGAGGAGCAGTACAACAGCACCTACAGGGTGGTGTCCG |
| | | TGCTGACCGTGCTGCACCAGGACTGGCTGAACGGCAAGGAATACAAGTGCAAGGTCTCCAACAAGGCCCTGC |
| | | CAGCCCCCATCGAAAAGACCATCAGCAAGGCCAAGGGCCAGCCACGGGAGCCCCAGGTGTACACCCTGCCCC |
| | | CCTCCCGGGAGGAGATGACCAAGAACCAGGTGTCCCTGACCTGTCTGGTGAAGGGCTTCTACCCCAGCGACA |
| | | TCGCCGTGGAGTGGGAGAGCAACGGCCAGCCCGAGAACAACTACAAGACCACCCCCCCAGTGCTGGACAGC |
| | | GACGGCAGCTTCACCCTGGACAGCAAGCTGACCGTGGACAAGTCCAGGTGGCAGCAGGGCAACGTGTTCAG |
| | | CTGCAGCGTGATGCACGAAGCGCTGCACAACCACTACACCCAGAAGAGCCTGAGCCTGTCCCCCGGCAAGGG |
| | | CGGCTCCGGCGGAAGCGATATCGTGCTGACACAGAGCCCTGCCACCCTGTCTCTGAGCCCTGGCGAGAGAGC |
| | | CACCCTGAGCTGCCGGGCCAGCCAGTTCATCGGCTCCCGCTACCTGGCCTGGTATCAGCAGAAGCCCGGACA |
| | | GGCTCCCAGACTGCTGATCTACGGCGCCAGCAACAGAGCTACCGGCGTGCCCGCCAGATTTTCTGGCAGCGG |
| | | CAGCGGCACCGACTTCACCCTGACCATCAGCAGCCTGGAACCCGAGGACTTCGCCACCTACTACTGCCAGCAG |
| | | TACTACGACTACCCCCAGACCTTCGGCCAGGGCACCAAGGTGGAGATCAAGGGCGGAGGCGGATCCGGGGG |
| | | TGGCGGAAGTGGAGGCGGAGGAAGCGGAGGGGGCGGAAGCCAGGTGCAATTGAAAGAGTCCGGCCCTGC |
| | | CCTGGTGAAGCCTACCCAGACCCTGACCCTGACATGCACCTTCAGCGGCTTCAGCCTGAGCAACAGAGGCGG |
| | | CGGAGTGGGCTGGATCAGACAGCCTCCCGGCAAGGCCCTGGAATGGCTGGCCTGGATCGACTGGGACGACG |
| | | ACAAGAGCTACAGCACCAGCCTGAAAACCCGGCTGACCATCTCCAAGGACACCAGCAAGAACCAGGTGGTGC |
| | | TCACCATGACCAACATGGACCCCGTGGACACCGCCACCTATTATTGCGCCCGGATGCATCTGCCCCTGGTGTTC |
| | | GATAGCTGGGGCCAGGGAACCCTGGTGACAGTGTCCAGC |
| anti- | | |
| LRP6_MOR08168- | | |
| hIgG1LALA | | |
| 2(CH2_CH3) | | |
| (mut Hinge | | |
| F:T; Y:D) | | |
| MOR06475- | | |
| scFv | | |
| SEQ ID NO: 257 | 8168-VL/CL | DIELTQPPSVSVAPGQTARISCSGDSLRNKVYWYQQKPGQAPVLVIYKNNRPSGIPERFSGSNSGNTATLTISGTQA |
| | | EDEADYYCQSYDGQKSLVFGGGTKLTVLGQPKAAPSVTLFPPSSEELQANKATLVCLISDFYPGAVTVAWKADSSP |
| | | VKAGVETTTPSKQSNNKYAASSYLSLTPEQWKSHRSYSCQVTHEGSTVEKTVAPTECS |
| SEQ ID NO: 258 | 8168-VL/CL- | GACATCGAGCTGACCCAGCCCCCTTCTGTGTCTGTGGCCCCTGGCCAGACCGCCAGAATCAGCTGCAGCGGC |
| | DNA | GACAGCCTGCGGAACAAGGTGTACTGGTATCAGCAGAAGCCCGGCCAGGCTCCCGTGCTGGTGATCTACAAG |
| | | AACAACCGGCCCAGCGGCATCCCTGAGCGGTTCAGCGGCAGCAACAGCGGCAATACCGCCACCCTGACCATC |
| | | AGCGGCACCCAGGCCGAAGATGAGGCCGACTACTACTGCCAGAGCTACGACGGCCAGAAAAGCCTGGTGTT |
| | | CGGCGGAGGCACCAAGCTTACCGTGCTGGGCCAGCCCAAAGCCGCCCCTAGCGTGACCCTGTTCCCCCCCAG |
| | | CAGCGAGGAACTGCAGGCCAACAAGGCCACCCTGGTCTGCCTGATCAGCGACTTCTACCCTGGCGCCGTGAC |
| | | CGTGGCCTGGAAGGCCGACAGCAGCCCCGTGAAGGCCGGCGTGGAGACAACCACCCCCAGCAAGCAGAGCA |
| | | ACAACAAGTACGCCGCCAGCAGCTACCTGAGCCTGACCCCCGAGCAGTGGAAGAGCCACAGAAGCTACAGCT |
| | | GCCAGGTCACCCACGAGGGCAGCACCGTGGAGAAAACCGTGGCCCCCACCGAGTGCAGC |
| SEQ ID NO: 259 | 8168- | QVQLVESGGGLVQPGGSLRLSCAASGFTFSDYVINWVRQAPGKGLEWVSGISWSGVNTHYADSVKGRFTISRDN |
| | hIgG1LALA- | SKNTLYLQMNSLRAEDTAVYYCARLGATANNIRYKFMDVWGQGTLVTVSSASTKGPSVFPLAPSSKSTSGGTAAL |
| | 2(CH2—CH3) | GCLVKDYFPEPVTVSWNSGALTSGVHTFPAVLQSSGLYSLSSVVTVPSSSLGTQTYICNVNHKPSNTKVDKRVEPKS |
| | (mut-Hinge- | CDKTHTGPPGPAPEAAGGPSVFLFPPKPKDTLMISRTPEVTCVVVDVSHEDPEVKFNWYVDGVEVHNAKTKPREE |
| | F:T; Y:D)-6475- | QYNSTYRVVSVLTVLHQDWLNGKEYKCKVSNKALPAPIEKTISKAKGQPREPQVYTLPPSREEMTKNQVSLTCLVK |
| | scFv | GFYPSDIAVEWESNGQPENNYKTTPPVLDSDGSFTLDSKLTVDKSRWQQGNVFSCSVMHEALHNHYTQKSLSLSP |
| | | GKSPPSPAPEAAGGPSVFLFPPKPKDTLMISRTPEVTCVVVDVSHEDPEVKFNWYVDGVEVHNAKTKPREEQYNS |
| | | TYRVVSVLTVLHQDWLNGKEYKCKVSNKALPAPIEKTISKAKGQPREPQVYTLPPSREEMTKNQVSLTCLVKGFYPS |
| | | DIAVEWESNGQPENNYKTTPPVLDSDGSFTLDSKLTVDKSRWQQGNVFSCSVMHEALHNHYTQKSLSLSPGKGG |
| | | SGGSDIVLTQSPATLSLSPGERATLSCRASQFIGSRYLAWYQQKPGQAPRLLIYGASNRATGVPARFSGSGSGTDFT |
| | | LTISSLEPEDFATYYCQQYYDYPQTFGQGTKVEIKGGGGSGGGGSGGGGSGGGGSQVQLKESGPALVKPTQTLTLT |
| | | CTFSGFSLSNRGGGVGWIRQPPGKALEWLAWIDWDDDKSYSTSLKTRLTISKDTSKNQVVLTMTNMDPVDTATY |
| | | YCARMHLPLVFDSWGQGTLVTVSS |
| SEQ ID NO: 260 | 8168- | CAGGTGCAATTGGTCGAGTCTGGCGGAGGACTGGTGCAGCCTGGTGGCAGCCTGAGACTGAGCTGCGCCGC |
| | hIgG1LALA- | CAGCGGCTTCACCTTCAGCGACTACGTGATCAACTGGGTGCGACAGGCCCCTGGAAAGGGCCTGGAATGGGT |
| | 2(CH2—CH3) | GTCCGGCATCTCTTGGTCTGGCGTGAACACCCACTACGCCGACAGCGTGAAGGGCCGGTTCACCATCAGCCG |
| | (mut-Hinge- | GGACAACAGCAAGAACACCCTGTACCTGCAGATGAACAGCCTGAGAGCCGAGGACACCGCCGTGTACTACTG |
| | F:T; Y:D)-6475- | TGCCAGACTGGGCGCCACCGCCAACAACATCCGGTACAAGTTCATGGACGTGTGGGGCCAGGGCACACTGGT |
| | scFv-DNA | GACCGTCAGCTCAGCTAGCACCAAGGGCCCCAGCGTGTTCCCCCTGGCCCCCAGCAGCAAGAGCACCAGCGG |
| | | CGGCACAGCCGCCCTGGGCTGCCTGGTGAAGGACTACTTCCCCGAGCCCGTGACCGTGTCCTGGAACAGCGG |
| | | AGCCCTGACCTCCGGCGTGCACACCTTCCCCGCCGTGCTGCAGAGCAGCGGCCTGTACAGCCTGTCCAGCGTG |
| | | GTGACAGTGCCCAGCAGCAGCCTGGGCACCCAGACCTACATCTGCAACGTGAACCACAAGCCCAGCAACACC |
| | | AAGGTGGACAAGAGAGTGGAGCCCAAGAGCTGCGACAAGACCCACACCGGCCCCCCCGGCCCAGCCCCAGA |
| | | GGCAGCGGGCGGACCCTCCGTGTTCCTGTTCCCCCCCAAGCCCAAGGACACCCTGATGATCAGCAGGACCCCC |
| | | GAGGTGACCTGCGTGGTGGTGGACGTGAGCCACGAGGACCCAGAGGTGAAGTTCAACTGGTACGTGGACGG |
| | | CGTGGAGGTGCACAACGCCAAGACCAAGCCCAGAGAGGAGCAGTACAACAGCACCTACAGGGTGGTGTCCG |
| | | TGCTGACCGTGCTGCACCAGGACTGGCTGAACGGCAAGGAATACAAGTGCAAGGTCTCCAACAAGGCCCTGC |
| | | CAGCCCCCATCGAAAAGACCATCAGCAAGGCCAAGGGCCAGCCACGGGAGCCCCAGGTGTACACCCTGCCCC |
| | | CCTCCCGGGAGGAGATGACCAAGAACCAGGTGTCCCTGACCTGTCTGGTGAAGGGCTTCTACCCCAGCGACA |
| | | TCGCCGTGGAGTGGGAGAGCAACGGCCAGCCCGAGAACAACTACAAGACCACCCCCCCAGTGCTGGACAGC |
| | | GACGGCAGCTTCACCCTGGACAGCAAGCTGACCGTGGACAAGTCCAGGTGGCAGCAGGGCAACGTGTTCAG |
| | | CTGCAGCGTGATGCACGAAGCGCTGCACAACCACTACACCCAGAAGAGCCTGAGCCTGTCCCCCGGCAAGTC |
| | | CCCCCCCTCCCCAGCCCCAGAGGCAGCGGGCGGACCCTCCGTGTTCCTGTTCCCCCCCAAGCCCAAGGACACC |
| | | CTGATGATCAGCAGGACCCCCGAGGTGACCTGCGTGGTGGTGGACGTGAGCCACGAGGACCCAGAGGTGAA |
| | | GTTCAACTGGTACGTGGACGGCGTGGAGGTGCACAACGCCAAGACCAAGCCCAGAGAGGAGCAGTACAACA |
| | | GCACCTACAGGGTGGTGTCCGTGCTGACCGTGCTGCACCAGGACTGGCTGAACGGCAAGGAATACAAGTGC |
| | | AAGGTCTCCAACAAGGCCCTGCCAGCCCCCATCGAAAAGACCATCAGCAAGGCCAAGGGCCAGCCACGGGA |
| | | GCCCCAGGTGTACACCCTGCCCCCCTCCCGGGAGGAGATGACCAAGAACCAGGTGTCCCTGACCTGTCTGGT |
| | | GAAGGGCTTCTACCCCAGCGACATCGCCGTGGAGTGGGAGAGCAACGGCCAGCCCGAGAACAACTACAAGA |
| | | CCACCCCCCCAGTGCTGGACAGCGACGGCAGCTTCACCCTGGACAGCAAGCTGACCGTGGACAAGTCCAGGT |
| | | GGCAGCAGGGCAACGTGTTCAGCTGCAGCGTGATGCACGAAGCCCTGCACAACCACTACACCCAGAAGAGCC |
| | | TGAGCCTGTCCCCCGGCAAGGGCGGCTCCGGCGGAAGCGATATCGTGCTGACACAGAGCCCTGCCACCCTGT |
| | | CTCTGAGCCCTGGCGAGAGAGCCACCCTGAGCTGCCGGGCCAGCCAGTTCATCGGCTCCCGCTACCTGGCCT |
| | | GGTATCAGCAGAAGCCCGGACAGGCTCCCAGACTGCTGATCTACGGCGCCAGCAACAGAGCTACCGGCGTGC |
| | | CCGCCAGATTTTCTGGCAGCGGCAGCGGCACCGACTTCACCCTGACCATCAGCAGCCTGGAACCCGAGGACTT |
| | | CGCCACCTACTACTGCCAGCAGTACTACGACTACCCCCAGACCTTCGGCCAGGGCACCAAGGTGGAGATCAA |
| | | GGGCGGAGGCGGATCCGGGGGTGGCGGAAGTGGAGGCGGAGGAAGCGGAGGGGGCGGAAGCCAGGTGC |
| | | AATTGAAAGAGTCCGGCCCTGCCCTGGTGAAGCCTACCCAGACCCTGACCCTGACATGCACCTTCAGCGGCTT |
| | | CAGCCTGAGCAACAGAGGCGGCGGAGTGGGCTGGATCAGACAGCCTCCCGGCAAGGCCCTGGAATGGCTGG |
| | | CCTGGATCGACTGGGACGACGACAAGAGCTACAGCACCAGCCTGAAAACCCGGCTGACCATCTCCAAGGACA |
| | | CCAGCAAGAACCAGGTGGTGCTCACCATGACCAACATGGACCCCGTGGACACCGCCACCTATTATTGCGCCCG |
| | | GATGCATCTGCCCCTGGTGTTCGATAGCTGGGGCCAGGGAACCCTGGTGACAGTGTCCAGC |
| Anti-LRP6 | | |
| MOR08545- | | |
| 2c Fab for | | |
| PEG | | |
| SEQ ID NO: 261 | 8545-VL 2c for | DIELTQPPSVSVAPGQTARISCSGDNIGSKYVHWYQQKPGQAPVLVIYGDSNRPSGIPERFSGSNSGNTATLTISGT |
| | PEG AA | QAEDEADYYCTRTSTPISGVFGGGTKLTVLGQPKAAPSVTLFPPSSEELQANKATLVCLISDFYPGAVTVAWKADSS |
| | | PVKAGVETTTPSKQSNNKYAASSYLSLTPEQWKSHRSYSCQVTHEGSTVEKTVAPTEAC |
| SEQ ID NO: 262 | 8545-VL 2c for | gatatcgaactgacccagccgccttcagtgagcgttgcaccaggtcagaccgcgcgtatctcgtgtagcggcgataatattggttctaagtatgtt |
| | PEG DNA | cattggtaccagcagaaacccgggcaggcgccagttcttgtgatttatggtgattctaatcgtccctcaggcatcccggaacgctttagcggatcc |
| | | aacagcggcaacaccgcgaccctgaccattagcggcactcaggcggaagacgaagcggattattattgcactcgtacttctactcctatttctgg |
| | | tgtgtttggcggcggcacgaagttaaccgttcttggccagccgaaagccgcaccgagtgtgacgctgtttccgccgagcagcgaagaattgcag |
| | | gcgaacaaagcgaccctggtgtgcctgattagcgacttttatccgggagccgtgacagtggcctggaaggcagatagcagccccgtcaaggcg |
| | | ggagtggagaccaccacaccctccaaacaaagcaacaacaagtacgcggccagcagctatctgagcctgacgcctgagcagtggaagtccca |
| | | cagaagctacagctgccaggtcacgcatgaggggagcaccgtggaaaaaaccgttgcgccgactgaggcctgc |
| SEQ ID NO 263 | 8545-VH 2c for | QVQLVESGGGLVQPGGSLRLSCAASGFTFSVNGMHWVRQAPGKGLEWVSVIDGMGHTYYADSVKGRFTISRDN |
| | PEG AA | SKNTLYLQMNSLRAEDTAVYYCARYDYIKYGAFDPWGQGTLVTVSSASTKGPSVFPLAPSSKSTSGGTAALGCLVK |
| | | DYFPEPVTVSWNSGALTSGVHTFPAVLQSSGLYSLSSVVTVPSSSLGTQTYICNVNHKPSNTKVDKKVEPKSC |
| SEQ ID NO 264 | 8545-VH 2c for | caggtgcaattggtggaaagcggcggcggcctggtgcaaccgggcggcagcctgcgtctgagctgcgcggcctccggatttaccttttctgttaa |
| | PEG DNA | tggtatgcattgggtgcgccaagcccctgggaagggtctcgagtgggtgagcgttattgatggtatgggtcatacttattatgctgattctgttaag |
| | | ggtcgttttaccatttcacgtgataattcgaaaaacaccctgtatctgcaaatgaacagcctgcgtgcggaagatacggccgtgtattattgcgcg |
| | | cgttatgattatattaagtatggtgcttttgatccttggggccaaggcaccctggtgacggttagctcagcgtcgaccaaaggtccaagcgtgtttc |
| | | cgctggctccgagcagcaaaagcaccagcggcggcacggctgccctgggctgcctggttaaagattatttcccggaaccagtcaccgtgagctg |
| | | gaacagcggggcgctgaccagcggcgtgcatacctttccggcggtgctgcaaagcagcggcctgtatagcctgagcagcgttgtgaccgtgccg |
| | | agcagcagcttaggcactcagacctatatttgcaacgtgaaccataaaccgagcaacaccaaagtggataaaaaagtggaaccgaaaagctgc |
| 801 | | |
| SEQ ID NO: 265 | 801 | qvqlvesggglvqpggslrlscaasgftfsdyvinwvrqapgkglewvsgiswsgvnthyadsvkgrftisrdnskntlylqmnslraedtavy |
| | | ycarlgatannirykfmdvwgqgtlvtvssggggsggggsggggsggggsdieltqppsvsvapgqtariscsgdslrnkvywyqqkpgqap |
| | | vlviyknnrpsgiperfsgsnsgntatltisgtqaedeadyycqsydgqkslvfgggtkltvlaasdahksevahrfkdlgeenfkalvliafaqyl |
| | | qqspfedhvklvnevtefaktcvadesaencdkslhtlfgdklctvatlretygemadccakqepernecflqhkddnpnlprlvrpevdv |
| | | mctafhdneetflkkylyeiarrhpyfyapellffakrykaafteccqaadkaacllpkldelrdegkassakqrlkcaslqkfgerafkawavar |
| | | lsqrfpkaefaevsklvtdltkvhtecchgdllecaddradlakyicenqdsissklkeccekpllekshciaevendempadlpslaadfvesk |
| | | dvcknyaeakdvflgmflyeyarrhpdysvvlllrlaktyettlekccaaadphecyakvfdefkplveepqnlikqncelfeqlgeykfqnall |
| | | vrytkkvpqvstptlvevsrnlgkvgskcckhpeakrmpcaedylsvvlnqlcvlhektpvsdrvtkccteslvnrrpcfsalevdetyvpkef |
| | | qaetftfhadictlsekerqikkqtalvelvkhkpkatkeqlkavmddfaafvekcckaddketcfaeegkklvaasqaalglaaaldivltqsp |
| | | atlslspgeratlscrasqfigsrylawyqqkpgqaprlliygasnratgvparfsgsgsgtdftltisslepedfatyycqqyydypqtfgqgtkve |
| | | ikggggsggggsggggsggggsqvqlkesgpalvkptqtltltctfsgfslsnrgggvgwirqppgkalewlawidwdddksystslktrltiskd |
| | | tsknqvvltmtnmdpvdtatyycarmhlplvfdswgqgtlvtvssaaaenlyfqgshhhhhh |
| SEQ ID NO: 266 | 801 DNA | caggttcaattggttgaaagcggtggtggtctggttcagcctggtggtagcctgcgtctgagctgtgcagcaagcggttttacctttagcgattatg |
| | | tgattaattgggttcgtcaggcaccgggtaaaggtctggaatgggttagcggtattagctggtcaggtgttaatacccattatgcagatagcgtga |
| | | aaggtcgttttaccattagccgtgataatagcaaaaataccctgtatctgcagatgaatagcctgcgtgcagaagataccgcagtttattattgtg |
| | | cacgtctgggtgcaaccgcaaataatattcgctataaatttatggatgtgtggggtcagggtacactagttaccgttagcagtggtggtggcggc |
| | | agcggcggtggcggttccggcggtggtggcagcggtggtggtggtagcgatatcgaactgacccagcctccgagcgttagcgttgcaccgggtc |
| | | agaccgcacgtattagctgtagcggtgatagtctgcgtaataaagtttattggtatcagcagaaaccgggtcaggctccggttctggttatttata |
| | | aaaataatcgtccgagcggtattccggaacgttttagcggtagcaatagcggtaataccgcaaccctgaccattagcggcacccaggcagaag |
| | | atgaagccgattattattgtcagagctatgatggtcagaaaagcctggtttttggtggtggcaccaagcttaccgttctggcggcgagcgacgctc |
| | | acaagagcgaagtggcacataggttcaaagatctgggcgaagagaactttaaggccctcgtcctgatcgctttcgcacagtacctccagcagtc |
| | | tccctttgaagatcacgtgaaactggtcaatgaggtgaccgaatttgccaagacatgcgtggctgatgagagtgcagaaaactgtgacaaatca |
| | | ctgcatactctctttggagataagctgtgcaccgtcgccacactcagagagacttatggggaaatggctgactgttgcgcaaaacaggagcctg |
| | | aacggaatgagtgtttcctccagcacaaggatgacaacccaaatctgccccgcctcgtgcgacctgaggtcgatgtgatgtgcaccgcctttcat |
| | | gacaacgaagagacattcctgaagaaatacctgtatgaaattgctcgtaggcacccatacttttatgcccccgagctcctgttctttgcaaagag |
| | | atacaaagctgccttcactgaatgttgccaggcagctgataaggccgcatgtctcctgcctaaactggacgagctccgggatgaaggtaaggctt |
| | | ccagcgccaaacagcgcctgaagtgcgcttctctccagaagtttggcgagcgagcattcaaagcctgggctgtggcccgtctcagtcagaggttt |
| | | ccaaaggcagaatttgctgaggtctcaaaactggtgaccgacctcacaaaggtccatactgagtgttgccacggagatctgctggaatgtgccg |
| | | acgatagagcagacctcgctaaatatatctgcgagaatcaggattccattagctctaagctgaaagaatgttgcgagaagcccctcctggaaaa |
| | | gagtcattgtatcgccgaggtggaaaacgacgagatgccagcagatctgccatcactcgctgccgactttgtggaatccaaagatgtctgcaag |
| | | aattacgcagaggctaaagacgtgttcctggggatgtttctgtatgagtacgcccggcgtcaccccgattatagcgtcgtgctcctgctccgactg |
| | | gcaaagacctacgaaacaactctggagaaatgttgcgctgccgcagaccctcatgaatgttatgctaaggtgttcgatgagtttaagccactcgt |
| | | cgaagagccccagaacctgattaaacagaattgcgaactgttcgagcagctcggtgaatacaagtttcagaacgccctgctcgtgcgttatacc |
| | | aaaaaggtccctcaggtgtctacaccaactctggtggaggtcagtaggaatctgggcaaagtgggatcaaagtgttgcaaacaccccgaggca |
| | | aagagaatgccttgtgctgaagattacctctccgtcgtgctgaaccagctctgcgtgctgcatgaaaagaccccagtcagcgatcgggtgacaa |
| | | aatgttgcaccgaatctctggtcaatcgccgaccctgtttcagtgccctcgaagtggacgaaacttatgtgcctaaggagtttcaggctgaaacat |
| | | tcacctttcacgccgatatctgcactctgtccgagaaagaaaggcagattaagaaacagacagcactggtcgagctcgtgaagcataaaccaa |
| | | aggctaccaaggagcagctgaaagccgtcatggacgatttcgcagcttttgtggaaaagtgttgcaaagccgacgataaggagacttgtttcgc |
| | | agaagaggggaaaaagctcgtggctgccagccaggcagctctgggtctggcggcggcgctggatatcgtgctgacacagagccctgccaccct |
| | | gtctctgagccctggcgagagagccaccctgagctgccgggccagccagttcatcggctcccgctacctggcctggtatcagcagaagcccgga |
| | | caggctcccagactgctgatctacggcgccagcaacagagctaccggcgtgcccgccagattttctggcagcggcagcggcaccgacttcaccc |
| | | tgaccatcagcagcctggaacccgaggacttcgccacctactactgccagcagtactacgactacccccagaccttcggccagggcaccaaggt |
| | | ggagatcaagggcggaggcggaagcgggggtggcggaagtggaggcggaggaagcggagggggcggaagccaggtgcaattgaaagagt |
| | | ccggccctgccctggtgaagcctacccagaccctgaccctgacatgcaccttcagcggcttcagcctgagcaacagaggcggcggagtgggctg |
| | | gatcagacagcctcccggcaaggccctggaatggctggcctggatcgactgggacgacgacaagagctacagcaccagcctgaaaacccggc |
| | | tgaccatctccaaggacaccagcaagaaccaggtggtgctcaccatgaccaacatggaccccgtggacaccgccacctattattgcgcccggat |
| | | gcatctgcccctggtgttcgatagctggggccagggaaccctggtgacagtgtccagcgcggccgcagagaacctgtattttcagggtagccac |
| | | catcatcaccatcac |
| 801T | | |
| SEQ ID NO: 267 | 801T | QVQLVESGGGLVQPGGSLRLSCAASGFTFSDYVMNWVRQAPGKGLEWVAGISWSGVNTHYADSVKGRFTISRD |
| | | NSKNTLYLQMNSLRAEDTAVYYCARLGATANNIRYKFMDVWGQGTLVTVSSGGGGSGGGGSGGGGSGGGGSD |
| | | IELTQPPSVSVAPGQTARISCSGDSLRNKVYWYQQKPGQAPVLVIYKNNRPSGIPERFSGSNSGNTATLTISGTQAE |
| | | DEADYYCQSYDGQKSLVFGGGTKLTVLAASDAHKSEVAHRFKDLGEENFKALVLIAFAQYLQQSPFEDHVKLVNEV |
| | | TEFAKTCVADESAENCDKSLHTLFGDKLCTVATLRETYGEMADCCAKQEPERNECFLQHKDDNPNLPRLVRPEVD |
| | | VMCTAFHDNEETFLKKYLYEIARRHPYFYAPELLFFAKRYKAAFTECCQAADKAACLLPKLDELRDEGKASSAKQRLK |
| | | CASLQKFGERAFKAWAVARLSQRFPKAEFAEVSKLVTDLTKVHTECCHGDLLECADDRADLAKYICENQDSISSKLK |
| | | ECCEKPLLEKSHCIAEVENDEMPADLPSLAADFVESKDVCKNYAEAKDVFLGMFLYEYARRHPDYSVVLLLRLAKTY |
| | | ETTLEKCCAAADPHECYAKVFDEFKPLVEEPQNLIKQNCELFEQLGEYKFQNALLVRYTKKVPQVSTPTLVEVSRNL |
| | | GKVGSKCCKHPEAKRMPCAEDYLSVVLNQLCVLHEKTPVSDRVTKCCTESLVNRRPCFSALEVDETYVPKEFQAETF |
| | | TFHADICTLSEKERQIKKQTALVELVKHKPKATKEQLKAVMDDFAAFVEKCCKADDKETCFAEEGKKLVAASQAAL |
| | | GLAAALDIVLTQSPATLSLSPGERATLSCRASQFIGSRYLAWYQQKPGQAPRLLIYGASNRATGVPARFSGSGSGTD |
| | | FTLTISSLEPEDFATYYCQQYYDYPQTFGQGTKVEIKGGGGSGGGGSGGGGSGGGGSQVQLKESGPALVKPTQTL |
| | | TLTCTFSGFSLSNRGGGVGWIRQPPGKALEWLAWIDWDDDKSYSTSLKTRLTISKDTSKNQVVLTMTNMDPVDT |
| | | ATYYCARFHLPLVFDSWGQGTLVTVSSAAAENLYFQGSHHHHHH |
| SEQ ID NO: 268 | 801T DNA | caggttcaattggttgaaagcggtggtggtctggttcagcctggtggtagcctgcgtctgagctgtgcagcaagcggttttacctttagcgattatg |
| | | tgatgaattgggttcgtcaggcaccgggtaaaggtctggaatgggttgccggtattagctggtcaggtgttaatacccattatgcagatagcgtg |
| | | aaaggtcgttttaccattagccgtgataatagcaaaaataccctgtatctgcagatgaatagcctgcgtgcagaagataccgcagtttattattgt |
| | | gcacgtctgggtgcaaccgcaaataatattcgctataaatttatggatgtgtggggtcagggtacactagttaccgttagcagtggtggtggcgg |
| | | cagcggcggtggcggttccggcggtggtggcagcggtggtggtggtagcgatatcgaactgacccagcctccgagcgttagcgttgcaccgggt |
| | | cagaccgcacgtattagctgtagcggtgatagtctgcgtaataaagtttattggtatcagcagaaaccgggtcaggctccggttctggttatttat |
| | | aaaaataatcgtccgagcggtattccggaacgttttagcggtagcaatagcggtaataccgcaaccctgaccattagcggcacccaggcagaa |
| | | gatgaagccgattattattgtcagagctatgatggtcagaaaagcctggtttttggtggtggcaccaagcttaccgttctggcggcgagcgacgct |
| | | cacaagagcgaagtggcacataggttcaaagatctgggcgaagagaactttaaggccctcgtcctgatcgctttcgcacagtacctccagcagt |
| | | ctccctttgaagatcacgtgaaactggtcaatgaggtgaccgaatttgccaagacatgcgtggctgatgagagtgcagaaaactgtgacaaatc |
| | | actgcatactctctttggagataagctgtgcaccgtcgccacactcagagagacttatggggaaatggctgactgttgcgcaaaacaggagcct |
| | | gaacggaatgagtgtttcctccagcacaaggatgacaacccaaatctgccccgcctcgtgcgacctgaggtcgatgtgatgtgcaccgcctttca |
| | | tgacaacgaagagacattcctgaagaaatacctgtatgaaattgctcgtaggcacccatacttttatgcccccgagctcctgttctttgcaaagag |
| | | atacaaagctgccttcactgaatgttgccaggcagctgataaggccgcatgtctcctgcctaaactggacgagctccgggatgaaggtaaggctt |
| | | ccagcgccaaacagcgcctgaagtgcgcttctctccagaagtttggcgagcgagcattcaaagcctgggctgtggcccgtctcagtcagaggttt |
| | | ccaaaggcagaatttgctgaggtctcaaaactggtgaccgacctcacaaaggtccatactgagtgttgccacggagatctgctggaatgtgccg |
| | | acgatagagcagacctcgctaaatatatctgcgagaatcaggattccattagctctaagctgaaagaatgttgcgagaagcccctcctggaaaa |
| | | gagtcattgtatcgccgaggtggaaaacgacgagatgccagcagatctgccatcactcgctgccgactttgtggaatccaaagatgtctgcaag |
| | | aattacgcagaggctaaagacgtgttcctggggatgtttctgtatgagtacgcccggcgtcaccccgattatagcgtcgtgctcctgctccgactg |
| | | gcaaagacctacgaaacaactctggagaaatgttgcgctgccgcagaccctcatgaatgttatgctaaggtgttcgatgagtttaagccactcgt |
| | | cgaagagccccagaacctgattaaacagaattgcgaactgttcgagcagctcggtgaatacaagtttcagaacgccctgctcgtgcgttatacc |
| | | aaaaaggtccctcaggtgtctacaccaactctggtggaggtcagtaggaatctgggcaaagtgggatcaaagtgttgcaaacaccccgaggca |
| | | aagagaatgccttgtgctgaagattacctctccgtcgtgctgaaccagctctgcgtgctgcatgaaaagaccccagtcagcgatcgggtgacaa |
| | | aatgttgcaccgaatctctggtcaatcgccgaccctgtttcagtgccctcgaagtggacgaaacttatgtgcctaaggagtttcaggctgaaacat |
| | | tcacctttcacgccgatatctgcactctgtccgagaaagaaaggcagattaagaaacagacagcactggtcgagctcgtgaagcataaaccaa |
| | | aggctaccaaggagcagctgaaagccgtcatggacgatttcgcagcttttgtggaaaagtgttgcaaagccgacgataaggagacttgtttcgc |
| | | agaagaggggaaaaagctcgtggctgccagccaggcagctctgggtctggcggcggcgctggatatcgtgctgacacagagccctgccaccct |
| | | gtctctgagccctggcgagagagccaccctgagctgccgggccagccagttcatcggctcccgctacctggcctggtatcagcagaagcccgga |
| | | caggctcccagactgctgatctacggcgccagcaacagagctaccggcgtgcccgccagattttctggcagcggcagcggcaccgacttcaccc |
| | | tgaccatcagcagcctggaacccgaggacttcgccacctactactgccagcagtactacgactacccccagaccttcggccagggcaccaaggt |
| | | ggagatcaagggcggaggcggaagcgggggtggcggaagtggaggcggaggaagcggagggggcggaagccaggtgcaattgaaagagt |
| | | ccggccctgccctggtgaagcctacccagaccctgaccctgacatgcaccttcagcggcttcagcctgagcaacagaggcggcggagtgggctg |
| | | gatcagacagcctcccggcaaggccctggaatggctggcctggatcgactgggacgacgacaagagctacagcaccagcctgaaaacccggc |
| | | tgaccatctccaaggacaccagcaagaaccaggtggtgctcaccatgaccaacatggaccccgtggacaccgccacctattattgcgcccggtt |
| | | tcatctgcccctggtgttcgatagctggggccagggaaccctggtgacagtgtccagcgcggccgcagagaacctgtattttcagggtagccacc |
| | | atcatcaccatcac |
| 802 | | |
| SEQ ID NO: 269 | 802 | divltqspatlslspgeratlscrasqfigsrylawyqqkpgqaprlliygasnratgvparfsgsgsgtdftltisslepedfatyycqqyydypqtf |
| | | gqgtkveikggggsggggsggggsggggsqvqlkesgpalvkptqtltltctfsgfslsnrgggvgwirqppgkalewlawidwdddksystsl |
| | | ktrltiskdtsknqvvltmtnmdpvdtatyycarmhlplvfdswgqgtlvtvssaasdahksevahrfkdlgeenfkalvliafaqylqqspfe |
| | | dhvklvnevtefaktcvadesaencdkslhtlfgdklctvatlretygemadccakqepernecflqhkddnpnlprlvrpevdvmctafhd |
| | | neetflkkylyeiarrhpyfyapellffakrykaafteccqaadkaacllpkldelrdegkassakqrlkcaslqkfgerafkawavarlsqrfpka |
| | | efaevsklvtdltkvhtecchgdllecaddradlakyicenqdsissklkeccekpllekshciaevendempadlpslaadfveskdvcknya |
| | | eakdvflgmflyeyarrhpdysvvlllrlaktyettlekccaaadphecyakvfdefkplveepqnlikqncelfeqlgeykfqnallvrytkkvp |
| | | qvstptlvevsrnlgkvgskcckhpeakrmpcaedylsvvlnqlcvlhektpvsdrvtkccteslvnrrpcfsalevdetyvpkefqaetftfha |
| | | dictlsekerqikkqtalvelvkhkpkatkeqlkavmddfaafvekcckaddketcfaeegkklvaasqaalglaaalqvqlvesggglvqpgg |
| | | slrlscaasgftfsdyvinwvrqapgkglewvsgiswsgvnthyadsvkgrftisrdnskntlylqmnslraedtavyycarlgatannirykfm |
| | | dvwgqgtlvtvssggggsggggsggggsggggsdieltqppsvsvapgqtariscsgdslrnkvywyqqkpgqapvlviyknnrpsgiperfs |
| | | gsnsgntatltisgtqaedeadyycqsydgqkslvfgggtkltvlaaaenlyfqgshhhhhh |
| SEQ ID NO: 270 | 802 DNA | gatatcgtgctgacacagagccctgccaccctgtctctgagccctggcgagagagccaccctgagctgccgggccagccagttcatcggctccc |
| | | gctacctggcctggtatcagcagaagcccggacaggctcccagactgctgatctacggcgccagcaacagagctaccggcgtgcccgccagatt |
| | | ttctggcagcggcagcggcaccgacttcaccctgaccatcagcagcctggaacccgaggacttcgccacctactactgccagcagtactacgac |
| | | tacccccagaccttcggccagggcaccaaggtggagatcaagggcggaggcggaagcgggggtggcggaagtggaggcggaggaagcgga |
| | | gggggcggaagccaggtgcaattgaaagagtccggccctgccctggtgaagcctacccagaccctgaccctgacatgcaccttcagcggcttca |
| | | gcctgagcaacagaggcggcggagtgggctggatcagacagcctcccggcaaggccctggaatggctggcctggatcgactgggacgacgac |
| | | aagagctacagcaccagcctgaaaacccggctgaccatctccaaggacaccagcaagaaccaggtggtgctcaccatgaccaacatggaccc |
| | | cgtggacaccgccacctattattgcgcccggatgcatctgcccctggtgttcgatagctggggccagggaaccctggtgacagtgtccagcgcgg |
| | | cgagcgacgctcacaagagcgaagtggcacataggttcaaagatctgggcgaagagaactttaaggccctcgtcctgatcgctttcgcacagta |
| | | cctccagcagtctccctttgaagatcacgtgaaactggtcaatgaggtgaccgaatttgccaagacatgcgtggctgatgagagtgcagaaaac |
| | | tgtgacaaatcactgcatactctctttggagataagctgtgcaccgtcgccacactcagagagacttatggggaaatggctgactgttgcgcaaa |
| | | acaggagcctgaacggaatgagtgtttcctccagcacaaggatgacaacccaaatctgccccgcctcgtgcgacctgaggtcgatgtgatgtgc |
| | | accgcctttcatgacaacgaagagacattcctgaagaaatacctgtatgaaattgctcgtaggcacccatacttttatgcccccgagctcctgttc |
| | | tttgcaaagagatacaaagctgccttcactgaatgttgccaggcagctgataaggccgcatgtctcctgcctaaactggacgagctccgggatga |
| | | aggtaaggcttccagcgccaaacagcgcctgaagtgcgcttctctccagaagtttggcgagcgagcattcaaagcctgggctgtggcccgtctc |
| | | agtcagaggtttccaaaggcagaatttgctgaggtctcaaaactggtgaccgacctcacaaaggtccatactgagtgttgccacggagatctgct |
| | | ggaatgtgccgacgatagagcagacctcgctaaatatatctgcgagaatcaggattccattagctctaagctgaaagaatgttgcgagaagccc |
| | | ctcctggaaaagagtcattgtatcgccgaggtggaaaacgacgagatgccagcagatctgccatcactcgctgccgactttgtggaatccaaag |
| | | atgtctgcaagaattacgcagaggctaaagacgtgttcctggggatgtttctgtatgagtacgcccggcgtcaccccgattatagcgtcgtgctcc |
| | | tgctccgactggcaaagacctacgaaacaactctggagaaatgttgcgctgccgcagaccctcatgaatgttatgctaaggtgttcgatgagttt |
| | | aagccactcgtcgaagagccccagaacctgattaaacagaattgcgaactgttcgagcagctcggtgaatacaagtttcagaacgccctgctcg |
| | | tgcgttataccaaaaaggtccctcaggtgtctacaccaactctggtggaggtcagtaggaatctgggcaaagtgggatcaaagtgttgcaaaca |
| | | ccccgaggcaaagagaatgccttgtgctgaagattacctctccgtcgtgctgaaccagctctgcgtgctgcatgaaaagaccccagtcagcgat |
| | | cgggtgacaaaatgttgcaccgaatctctggtcaatcgccgaccctgtttcagtgccctcgaagtggacgaaacttatgtgcctaaggagtttca |
| | | ggctgaaacattcacctttcacgccgatatctgcactctgtccgagaaagaaaggcagattaagaaacagacagcactggtcgagctcgtgaa |
| | | gcataaaccaaaggctaccaaggagcagctgaaagccgtcatggacgatttcgcagcttttgtggaaaagtgttgcaaagccgacgataagga |
| | | gacttgtttcgcagaagaggggaaaaagctcgtggctgccagccaggcagctctgggtctggcggcggcgctgcaggttcaattggttgaaagc |
| | | ggtggtggtctggttcagcctggtggtagcctgcgtctgagctgtgcagcaagcggttttacctttagcgattatgtgattaattgggttcgtcagg |
| | | caccgggtaaaggtctggaatgggttagcggtattagctggtcaggtgttaatacccattatgcagatagcgtgaaaggtcgttttaccattagcc |
| | | gtgataatagcaaaaataccctgtatctgcagatgaatagcctgcgtgcagaagataccgcagtttattattgtgcacgtctgggtgcaaccgca |
| | | aataatattcgctataaatttatggatgtgtggggtcagggtacactagttaccgttagcagtggtggtggcggcagcggcggtggcggttccgg |
| | | cggtggtggcagcggtggtggtggtagcgatatcgaactgacccagcctccgagcgttagcgttgcaccgggtcagaccgcacgtattagctgt |
| | | agcggtgatagtctgcgtaataaagtttattggtatcagcagaaaccgggtcaggctccggttctggttatttataaaaataatcgtccgagcggt |
| | | attccggaacgttttagcggtagcaatagcggtaataccgcaaccctgaccattagcggcacccaggcagaagatgaagccgattattattgtc |
| | | agagctatgatggtcagaaaagcctggtttttggtggtggcaccaagcttaccgttctggcggccgcagagaacctgtattttcagggtagccac |
| | | catcatcaccatcac |
| 802T | | |
| SEQ ID NO: 271 | 802T | DIVLTQSPATLSLSPGERATLSCRASQFIGSRYLAWYQQKPGQAPRLLIYGASNRATGVPARFSGSGSGTDFTLTISSL |
| | | EPEDFATYYCQQYYDYPQTFGQGTKVEIKGGGGSGGGGSGGGGSGGGGSQVQLKESGPALVKPTQTLTLTCTFS |
| | | GFSLSNRGGGVGWIRQPPGKALEWLAWIDWDDDKSYSTSLKTRLTISKDTSKNQVVLTMTNMDPVDTATYYCAR |
| | | FHLPLVFDSWGQGTLVTVSSAASDAHKSEVAHRFKDLGEENFKALVLIAFAQYLQQSPFEDHVKLVNEVTEFAKTC |
| | | VADESAENCDKSLHTLFGDKLCTVATLRETYGEMADCCAKQEPERNECFLQHKDDNPNLPRLVRPEVDVMCTAF |
| | | HDNEETFLKKYLYEIARRHPYFYAPELLFFAKRYKAAFTECCQAADKAACLLPKLDELRDEGKASSAKQRLKCASLQK |
| | | FGERAFKAWAVARLSQRFPKAEFAEVSKLVTDLTKVHTECCHGDLLECADDRADLAKYICENQDSISSKLKECCEKP |
| | | LLEKSHCIAEVENDEMPADLPSLAADFVESKDVCKNYAEAKDVFLGMFLYEYARRHPDYSVVLLLRLAKTYETTLEKC |
| | | CAAADPHECYAKVFDEFKPLVEEPQNLIKQNCELFEQLGEYKFQNALLVRYTKKVPQVSTPTLVEVSRNLGKVGSKC |
| | | CKHPEAKRMPCAEDYLSVVLNQLCVLHEKTPVSDRVTKCCTESLVNRRPCFSALEVDETYVPKEFQAETFTFHADIC |
| | | TLSEKERQIKKQTALVELVKHKPKATKEQLKAVMDDFAAFVEKCCKADDKETCFAEEGKKLVAASQAALGLAAALQ |
| | | VQLVESGGGLVQPGGSLRLSCAASGFTFSDYVMNWVRQAPGKGLEWVAGISWSGVNTHYADSVKGRFTISRDN |
| | | SKNTLYLQMNSLRAEDTAVYYCARLGATANNIRYKFMDVWGQGTLVTVSSGGGGSGGGGSGGGGSGGGGSDIE |
| | | LTQPPSVSVAPGQTARISCSGDSLRNKVYWYQQKPGQAPVLVIYKNNRPSGIPERFSGSNSGNTATLTISGTQAED |
| | | EADYYCQSYDGQKSLVFGGGTKLTVLAAAENLYFQGSHHHHHH |
| SEQ ID NO: 272 | 802T DNA | gatatcgtgctgacacagagccctgccaccctgtctctgagccctggcgagagagccaccctgagctgccgggccagccagttcatcggctccc |
| | | gctacctggcctggtatcagcagaagcccggacaggctcccagactgctgatctacggcgccagcaacagagctaccggcgtgcccgccagatt |
| | | ttctggcagcggcagcggcaccgacttcaccctgaccatcagcagcctggaacccgaggacttcgccacctactactgccagcagtactacgac |
| | | tacccccagaccttcggccagggcaccaaggtggagatcaagggcggaggcggaagcgggggtggcggaagtggaggcggaggaagcgga |
| | | gggggcggaagccaggtgcaattgaaagagtccggccctgccctggtgaagcctacccagaccctgaccctgacatgcaccttcagcggcttca |
| | | gcctgagcaacagaggcggcggagtgggctggatcagacagcctcccggcaaggccctggaatggctggcctggatcgactgggacgacgac |
| | | aagagctacagcaccagcctgaaaacccggctgaccatctccaaggacaccagcaagaaccaggtggtgctcaccatgaccaacatggaccc |
| | | cgtggacaccgccacctattattgcgcccggtttcatctgcccctggtgttcgatagctggggccagggaaccctggtgacagtgtccagcgcgg |
| | | cgagcgacgctcacaagagcgaagtggcacataggttcaaagatctgggcgaagagaactttaaggccctcgtcctgatcgctttcgcacagta |
| | | cctccagcagtctccctttgaagatcacgtgaaactggtcaatgaggtgaccgaatttgccaagacatgcgtggctgatgagagtgcagaaaac |
| | | tgtgacaaatcactgcatactctctttggagataagctgtgcaccgtcgccacactcagagagacttatggggaaatggctgactgttgcgcaaa |
| | | acaggagcctgaacggaatgagtgtttcctccagcacaaggatgacaacccaaatctgccccgcctcgtgcgacctgaggtcgatgtgatgtgc |
| | | accgcctttcatgacaacgaagagacattcctgaagaaatacctgtatgaaattgctcgtaggcacccatacttttatgcccccgagctcctgttc |
| | | tttgcaaagagatacaaagctgccttcactgaatgttgccaggcagctgataaggccgcatgtctcctgcctaaactggacgagctccgggatga |
| | | aggtaaggcttccagcgccaaacagcgcctgaagtgcgcttctctccagaagtttggcgagcgagcattcaaagcctgggctgtggcccgtctc |
| | | agtcagaggtttccaaaggcagaatttgctgaggtctcaaaactggtgaccgacctcacaaaggtccatactgagtgttgccacggagatctgct |
| | | ggaatgtgccgacgatagagcagacctcgctaaatatatctgcgagaatcaggattccattagctctaagctgaaagaatgttgcgagaagccc |
| | | ctcctggaaaagagtcattgtatcgccgaggtggaaaacgacgagatgccagcagatctgccatcactcgctgccgactttgtggaatccaaag |
| | | atgtctgcaagaattacgcagaggctaaagacgtgttcctggggatgtttctgtatgagtacgcccggcgtcaccccgattatagcgtcgtgctcc |
| | | tgctccgactggcaaagacctacgaaacaactctggagaaatgttgcgctgccgcagaccctcatgaatgttatgctaaggtgttcgatgagttt |
| | | aagccactcgtcgaagagccccagaacctgattaaacagaattgcgaactgttcgagcagctcggtgaatacaagtttcagaacgccctgctcg |
| | | tgcgttataccaaaaaggtccctcaggtgtctacaccaactctggtggaggtcagtaggaatctgggcaaagtgggatcaaagtgttgcaaaca |
| | | ccccgaggcaaagagaatgccttgtgctgaagattacctctccgtcgtgctgaaccagctctgcgtgctgcatgaaaagaccccagtcagcgat |
| | | cgggtgacaaaatgttgcaccgaatctctggtcaatcgccgaccctgtttcagtgccctcgaagtggacgaaacttatgtgcctaaggagtttca |
| | | ggctgaaacattcacctttcacgccgatatctgcactctgtccgagaaagaaaggcagattaagaaacagacagcactggtcgagctcgtgaa |
| | | gcataaaccaaaggctaccaaggagcagctgaaagccgtcatggacgatttcgcagcttttgtggaaaagtgttgcaaagccgacgataagga |
| | | gacttgtttcgcagaagaggggaaaaagctcgtggctgccagccaggcagctctgggtctggcggcggcgctgcaggttcaattggttgaaagc |
| | | ggtggtggtctggttcagcctggtggtagcctgcgtctgagctgtgcagcaagcggttttacctttagcgattatgtgatgaattgggttcgtcagg |
| | | caccgggtaaaggtctggaatgggttgccggtattagctggtcaggtgttaatacccattatgcagatagcgtgaaaggtcgttttaccattagcc |
| | | gtgataatagcaaaaataccctgtatctgcagatgaatagcctgcgtgcagaagataccgcagtttattattgtgcacgtctgggtgcaaccgca |
| | | aataatattcgctataaatttatggatgtgtggggtcagggtacactagttaccgttagcagtggtggtggcggcagcggcggtggcggttccgg |
| | | cggtggtggcagcggtggtggtggtagcgatatcgaactgacccagcctccgagcgttagcgttgcaccgggtcagaccgcacgtattagctgt |
| | | agcggtgatagtctgcgtaataaagtttattggtatcagcagaaaccgggtcaggctccggttctggttatttataaaaataatcgtccgagcggt |
| | | attccggaacgttttagcggtagcaatagcggtaataccgcaaccctgaccattagcggcacccaggcagaagatgaagccgattattattgtc |
| | | agagctatgatggtcagaaaagcctggtttttggtggtggcaccaagcttaccgttctggcggccgcagagaacctgtattttcagggtagccac |
| | | catcatcaccatcac |
| 803T | | |
| SEQ ID NO: 273 | 803T | QVQLVESGGGLVQPGGSLRLSCAASGFTFSDYVMNWVRQAPGKGLEWVAGISWSGVNTHYADSVKGRFTISRD |
| | | NSKNTLYLQMNSLRAEDTAVYYCARLGATANNIRYKFMDVWGQGTLVTVSSGGGGSGGGGSGGGGSGGGGSD |
| | | IELTQPPSVSVAPGQTARISCSGDSLRNKVYWYQQKPGQAPVLVIYKNNRPSGIPERFSGSNSGNTATLTISGTQAE |
| | | DEADYYCQSYDGQKSLVFGGGTKLTVLGGGGSGGDAHKSEVAHRFKDLGEENFKALVLIAFAQYLQQSPFEDHVK |
| | | LVNEVTEFAKTCVADESAENCDKSLHTLFGDKLCTVATLRETYGEMADCCAKQEPERNECFLQHKDDNPNLPRLVR |
| | | PEVDVMCTAFHDNEETFLKKYLYEIARRHPYFYAPELLFFAKRYKAAFTECCQAADKAACLLPKLDELRDEGKASSAK |
| | | QRLKCASLQKFGERAFKAWAVARLSQRFPKAEFAEVSKLVTDLTKVHTECCHGDLLECADDRADLAKYICENQDSIS |
| | | SKLKECCEKPLLEKSHCIAEVENDEMPADLPSLAADFVESKDVCKNYAEAKDVFLGMFLYEYARRHPDYSVVLLLRL |
| | | AKTYETTLEKCCAAADPHECYAKVFDEFKPLVEEPQNLIKQNCELFEQLGEYKFQNALLVRYTKKVPQVSTPTLVEVS |
| | | RNLGKVGSKCCKHPEAKRMPCAEDYLSVVLNQLCVLHEKTPVSDRVTKCCTESLVNRRPCFSALEVDETYVPKEFQ |
| | | AETFTFHADICTLSEKERQIKKQTALVELVKHKPKATKEQLKAVMDDFAAFVEKCCKADDKETCFAEEGKKLVAASQ |
| | | AALGLGGGGSGGGGSGGGGSDIVLTQSPATLSLSPGERATLSCRASQFIGSRYLAWYQQKPGQAPRLLIYGASNRA |
| | | TGVPARFSGSGSGTDFTLTISSLEPEDFATYYCQQYYDYPQTFGQGTKVEIKGGGGSGGGGSGGGGSGGGGSQVQ |
| | | LKESGPALVKPTQTLTLTCTFSGFSLSNRGGGVGWIRQPPGKALEWLAWIDWDDDKSYSTSLKTRLTISKDTSKNQ |
| | | VVLTMTNMDPVDTATYYCARFHLPLVFDSWGQGTLVTVSSAAAENLYFQGSHHHHHH |
| SEQ ID NO: 274 | 803T DNA | caggttcaattggttgaaagcggtggtggtctggttcagcctggtggtagcctgcgtctgagctgtgcagcaagcggttttacctttagcgattatg |
| | | tgatgaattgggttcgtcaggcaccgggtaaaggtctggaatgggttgccggtattagctggtcaggtgttaatacccattatgcagatagcgtg |
| | | aaaggtcgttttaccattagccgtgataatagcaaaaataccctgtatctgcagatgaatagcctgcgtgcagaagataccgcagtttattattgt |
| | | gcacgtctgggtgcaaccgcaaataatattcgctataaatttatggatgtgtggggtcagggtacactagttaccgttagcagtggtggtggcgg |
| | | cagcggcggtggcggttccggcggtggtggcagcggtggtggtggtagcgatatcgaactgacccagcctccgagcgttagcgttgcaccgggt |
| | | cagaccgcacgtattagctgtagcggtgatagtctgcgtaataaagtttattggtatcagcagaaaccgggtcaggctccggttctggttatttat |
| | | aaaaataatcgtccgagcggtattccggaacgttttagcggtagcaatagcggtaataccgcaaccctgaccattagcggcacccaggcagaa |
| | | gatgaagccgattattattgtcagagctatgatggtcagaaaagcctggtttttggtggtggcaccaagcttaccgttctggggggtggcggaag |
| | | tgggggtgacgctcacaagagcgaagtggcacataggttcaaagatctgggcgaagagaactttaaggccctcgtcctgatcgctttcgcacag |
| | | tacctccagcagtctccctttgaagatcacgtgaaactggtcaatgaggtgaccgaatttgccaagacatgcgtggctgatgagagtgcagaaa |
| | | actgtgacaaatcactgcatactctctttggagataagctgtgcaccgtcgccacactcagagagacttatggggaaatggctgactgttgcgca |
| | | aaacaggagcctgaacggaatgagtgtttcctccagcacaaggatgacaacccaaatctgccccgcctcgtgcgacctgaggtcgatgtgatgt |
| | | gcaccgcctttcatgacaacgaagagacattcctgaagaaatacctgtatgaaattgctcgtaggcacccatacttttatgcccccgagctcctgt |
| | | tctttgcaaagagatacaaagctgccttcactgaatgttgccaggcagctgataaggccgcatgtctcctgcctaaactggacgagctccgggat |
| | | gaaggtaaggcttccagcgccaaacagcgcctgaagtgcgcttctctccagaagtttggcgagcgagcattcaaagcctgggctgtggcccgtc |
| | | tcagtcagaggtttccaaaggcagaatttgctgaggtctcaaaactggtgaccgacctcacaaaggtccatactgagtgttgccacggagatctg |
| | | ctggaatgtgccgacgatagagcagacctcgctaaatatatctgcgagaatcaggattccattagctctaagctgaaagaatgttgcgagaagc |
| | | ccctcctggaaaagagtcattgtatcgccgaggtggaaaacgacgagatgccagcagatctgccatcactcgctgccgactttgtggaatccaa |
| | | agatgtctgcaagaattacgcagaggctaaagacgtgttcctggggatgtttctgtatgagtacgcccggcgtcaccccgattatagcgtcgtgct |
| | | cctgctccgactggcaaagacctacgaaacaactctggagaaatgttgcgctgccgcagaccctcatgaatgttatgctaaggtgttcgatgagt |
| | | ttaagccactcgtcgaagagccccagaacctgattaaacagaattgcgaactgttcgagcagctcggtgaatacaagtttcagaacgccctgct |
| | | cgtgcgttataccaaaaaggtccctcaggtgtctacaccaactctggtggaggtcagtaggaatctgggcaaagtgggatcaaagtgttgcaaa |
| | | caccccgaggcaaagagaatgccttgtgctgaagattacctctccgtcgtgctgaaccagctctgcgtgctgcatgaaaagaccccagtcagcg |
| | | atcgggtgacaaaatgttgcaccgaatctctggtcaatcgccgaccctgtttcagtgccctcgaagtggacgaaacttatgtgcctaaggagtttc |
| | | aggctgaaacattcacctttcacgccgatatctgcactctgtccgagaaagaaaggcagattaagaaacagacagcactggtcgagctcgtga |
| | | agcataaaccaaaggctaccaaggagcagctgaaagccgtcatggacgatttcgcagcttttgtggaaaagtgttgcaaagccgacgataagg |
| | | agacttgtttcgcagaagaggggaaaaagctcgtggctgccagccaggcagctctgggtctggggggtggcggaagtgggggtggcggaagt |
| | | gggggtggcggaagtgatatcgtgctgacacagagccctgccaccctgtctctgagccctggcgagagagccaccctgagctgccgggccagc |
| | | cagttcatcggctcccgctacctggcctggtatcagcagaagcccggacaggctcccagactgctgatctacggcgccagcaacagagctaccg |
| | | gcgtgcccgccagattttctggcagcggcagcggcaccgacttcaccctgaccatcagcagcctggaacccgaggacttcgccacctactactgc |
| | | cagcagtactacgactacccccagaccttcggccagggcaccaaggtggagatcaagggcggaggcggaagcgggggtggcggaagtggag |
| | | gcggaggaagcggagggggcggaagccaggtgcaattgaaagagtccggccctgccctggtgaagcctacccagaccctgaccctgacatgc |
| | | accttcagcggcttcagcctgagcaacagaggcggcggagtgggctggatcagacagcctcccggcaaggccctggaatggctggcctggatc |
| | | gactgggacgacgacaagagctacagcaccagcctgaaaacccggctgaccatctccaaggacaccagcaagaaccaggtggtgctcaccat |
| | | gaccaacatggaccccgtggacaccgccacctattattgcgcccggtttcatctgcccctggtgttcgatagctggggccagggaaccctggtga |
| | | cagtgtccagcgcggccgcagagaacctgtattttcagggtagccaccatcatcaccatcac |
| 804T | | |
| SEQ ID NO: 275 | 804T | DIVLTQSPATLSLSPGERATLSCRASQFIGSRYLAWYQQKPGQAPRLLIYGASNRATGVPARFSGSGSGTDFTLTISSL |
| | | EPEDFATYYCQQYYDYPQTFGQGTKVEIKGGGGSGGGGSGGGGSGGGGSQVQLKESGPALVKPTQTLTLTCTFS |
| | | GFSLSNRGGGVGWIRQPPGKALEWLAWIDWDDDKSYSTSLKTRLTISKDTSKNQVVLTMTNMDPVDTATYYCAR |
| | | FHLPLVFDSWGQGTLVTVSSGGGGSGGDAHKSEVAHRFKDLGEENFKALVLIAFAQYLQQSPFEDHVKLVNEVTE |
| | | FAKTCVADESAENCDKSLHTLFGDKLCTVATLRETYGEMADCCAKQEPERNECFLQHKDDNPNLPRLVRPEVDVM |
| | | CTAFHDNEETFLKKYLYEIARRHPYFYAPELLFFAKRYKAAFTECCQAADKAACLLPKLDELRDEGKASSAKQRLKCA |
| | | SLQKFGERAFKAWAVARLSQRFPKAEFAEVSKLVTDLTKVHTECCHGDLLECADDRADLAKYICENQDSISSKLKEC |
| | | CEKPLLEKSHCIAEVENDEMPADLPSLAADFVESKDVCKNYAEAKDVFLGMFLYEYARRHPDYSVVLLLRLAKTYET |
| | | TLEKCCAAADPHECYAKVFDEFKPLVEEPQNLIKQNCELFEQLGEYKFQNALLVRYTKKVPQVSTPTLVEVSRNLGK |
| | | VGSKCCKHPEAKRMPCAEDYLSVVLNQLCVLHEKTPVSDRVTKCCTESLVNRRPCFSALEVDETYVPKEFQAETFTF |
| | | HADICTLSEKERQIKKQTALVELVKHKPKATKEQLKAVMDDFAAFVEKCCKADDKETCFAEEGKKLVAASQAALGL |
| | | GGGGSGGGGSGGGGSQVQLVESGGGLVQPGGSLRLSCAASGFTFSDYVMNWVRQAPGKGLEWVAGISWSGV |
| | | NTHYADSVKGRFTISRDNSKNTLYLQMNSLRAEDTAVYYCARLGATANNIRYKFMDVWGQGTLVTVSSGGGGSG |
| | | GGGSGGGGSGGGGSDIELTQPPSVSVAPGQTARISCSGDSLRNKVYWYQQKPGQAPVLVIYKNNRPSGIPERFSG |
| | | SNSGNTATLTISGTQAEDEADYYCQSYDGQKSLVFGGGTKLTVLAAAENLYFQGSHHHHHH |
| SEQ ID NO: 276 | 804T DNA | gatatcgtgctgacacagagccctgccaccctgtctctgagccctggcgagagagccaccctgagctgccgggccagccagttcatcggctccc |
| | | gctacctggcctggtatcagcagaagcccggacaggctcccagactgctgatctacggcgccagcaacagagctaccggcgtgcccgccagatt |
| | | ttctggcagcggcagcggcaccgacttcaccctgaccatcagcagcctggaacccgaggacttcgccacctactactgccagcagtactacgac |
| | | tacccccagaccttcggccagggcaccaaggtggagatcaagggcggaggcggaagcgggggtggcggaagtggaggcggaggaagcgga |
| | | gggggcggaagccaggtgcaattgaaagagtccggccctgccctggtgaagcctacccagaccctgaccctgacatgcaccttcagcggcttca |
| | | gcctgagcaacagaggcggcggagtgggctggatcagacagcctcccggcaaggccctggaatggctggcctggatcgactgggacgacgac |
| | | aagagctacagcaccagcctgaaaacccggctgaccatctccaaggacaccagcaagaaccaggtggtgctcaccatgaccaacatggaccc |
| | | cgtggacaccgccacctattattgcgcccggtttcatctgcccctggtgttcgatagctggggccagggaaccctggtgacagtgtccagcgggg |
| | | gtggcggaagtgggggtgacgctcacaagagcgaagtggcacataggttcaaagatctgggcgaagagaactttaaggccctcgtcctgatcg |
| | | ctttcgcacagtacctccagcagtctccctttgaagatcacgtgaaactggtcaatgaggtgaccgaatttgccaagacatgcgtggctgatgag |
| | | agtgcagaaaactgtgacaaatcactgcatactctctttggagataagctgtgcaccgtcgccacactcagagagacttatggggaaatggctg |
| | | actgttgcgcaaaacaggagcctgaacggaatgagtgtttcctccagcacaaggatgacaacccaaatctgccccgcctcgtgcgacctgaggt |
| | | cgatgtgatgtgcaccgcctttcatgacaacgaagagacattcctgaagaaatacctgtatgaaattgctcgtaggcacccatacttttatgcccc |
| | | cgagctcctgttctttgcaaagagatacaaagctgccttcactgaatgttgccaggcagctgataaggccgcatgtctcctgcctaaactggacg |
| | | agctccgggatgaaggtaaggcttccagcgccaaacagcgcctgaagtgcgcttctctccagaagtttggcgagcgagcattcaaagcctgggc |
| | | tgtggcccgtctcagtcagaggtttccaaaggcagaatttgctgaggtctcaaaactggtgaccgacctcacaaaggtccatactgagtgttgcc |
| | | acggagatctgctggaatgtgccgacgatagagcagacctcgctaaatatatctgcgagaatcaggattccattagctctaagctgaaagaatg |
| | | ttgcgagaagcccctcctggaaaagagtcattgtatcgccgaggtggaaaacgacgagatgccagcagatctgccatcactcgctgccgacttt |
| | | gtggaatccaaagatgtctgcaagaattacgcagaggctaaagacgtgttcctggggatgtttctgtatgagtacgcccggcgtcaccccgatta |
| | | tagcgtcgtgctcctgctccgactggcaaagacctacgaaacaactctggagaaatgttgcgctgccgcagaccctcatgaatgttatgctaagg |
| | | tgttcgatgagtttaagccactcgtcgaagagccccagaacctgattaaacagaattgcgaactgttcgagcagctcggtgaatacaagtttcag |
| | | aacgccctgctcgtgcgttataccaaaaaggtccctcaggtgtctacaccaactctggtggaggtcagtaggaatctgggcaaagtgggatcaa |
| | | agtgttgcaaacaccccgaggcaaagagaatgccttgtgctgaagattacctctccgtcgtgctgaaccagctctgcgtgctgcatgaaaagac |
| | | cccagtcagcgatcgggtgacaaaatgttgcaccgaatctctggtcaatcgccgaccctgtttcagtgccctcgaagtggacgaaacttatgtgc |
| | | ctaaggagtttcaggctgaaacattcacctttcacgccgatatctgcactctgtccgagaaagaaaggcagattaagaaacagacagcactggt |
| | | cgagctcgtgaagcataaaccaaaggctaccaaggagcagctgaaagccgtcatggacgatttcgcagcttttgtggaaaagtgttgcaaagc |
| | | cgacgataaggagacttgtttcgcagaagaggggaaaaagctcgtggctgccagccaggcagctctgggtctggggggtggcggaagtgggg |
| | | gtggcggaagtgggggtggcggaagtcaggttcaattggttgaaagcggtggtggtctggttcagcctggtggtagcctgcgtctgagctgtgca |
| | | gcaagcggttttacctttagcgattatgtgatgaattgggttcgtcaggcaccgggtaaaggtctggaatgggttgccggtattagctggtcaggt |
| | | gttaatacccattatgcagatagcgtgaaaggtcgttttaccattagccgtgataatagcaaaaataccctgtatctgcagatgaatagcctgcgt |
| | | gcagaagataccgcagtttattattgtgcacgtctgggtgcaaccgcaaataatattcgctataaatttatggatgtgtggggtcagggtacacta |
| | | gttaccgttagcagtggtggtggcggcagcggcggtggcggttccggcggtggtggcagcggtggtggtggtagcgatatcgaactgacccagc |
| | | ctccgagcgttagcgttgcaccgggtcagaccgcacgtattagctgtagcggtgatagtctgcgtaataaagtttattggtatcagcagaaaccg |
| | | ggtcaggctccggttctggttatttataaaaataatcgtccgagcggtattccggaacgttttagcggtagcaatagcggtaataccgcaaccctg |
| | | accattagcggcacccaggcagaagatgaagccgattattattgtcagagctatgatggtcagaaaagcctggtttttggtggtggcaccaagct |
| | | taccgttctggcggccgcagagaacctgtattttcagggtagccaccatcatcaccatcac |
| 801T NT | | |
| SEQ ID NO: 277 | 801T NT | QVQLVESGGGLVQPGGSLRLSCAASGFTFSDYVMNWVRQAPGKGLEWVAGISWSGVNTHYADSVKGRFTISRD |
| | | NSKNTLYLQMNSLRAEDTAVYYCARLGATANNIRYKFMDVWGQGTLVTVSSGGGGSGGGGSGGGGSGGGGSD |
| | | IELTQPPSVSVAPGQTARISCSGDSLRNKVYWYQQKPGQAPVLVIYKNNRPSGIPERFSGSNSGNTATLTISGTQAE |
| | | DEADYYCQSYDGQKSLVFGGGTKLTVLAASDAHKSEVAHRFKDLGEENFKALVLIAFAQYLQQSPFEDHVKLVNEV |
| | | TEFAKTCVADESAENCDKSLHTLFGDKLCTVATLRETYGEMADCCAKQEPERNECFLQHKDDNPNLPRLVRPEVD |
| | | VMCTAFHDNEETFLKKYLYEIARRHPYFYAPELLFFAKRYKAAFTECCQAADKAACLLPKLDELRDEGKASSAKQRLK |
| | | CASLQKFGERAFKAWAVARLSQRFPKAEFAEVSKLVTDLTKVHTECCHGDLLECADDRADLAKYICENQDSISSKLK |
| | | ECCEKPLLEKSHCIAEVENDEMPADLPSLAADFVESKDVCKNYAEAKDVFLGMFLYEYARRHPDYSVVLLLRLAKTY |
| | | ETTLEKCCAAADPHECYAKVFDEFKPLVEEPQNLIKQNCELFEQLGEYKFQNALLVRYTKKVPQVSTPTLVEVSRNL |
| | | GKVGSKCCKHPEAKRMPCAEDYLSVVLNQLCVLHEKTPVSDRVTKCCTESLVNRRPCFSALEVDETYVPKEFQAETF |
| | | TFHADICTLSEKERQIKKQTALVELVKHKPKATKEQLKAVMDDFAAFVEKCCKADDKETCFAEEGKKLVAASQAAL |
| | | GLAAALDIVLTQSPATLSLSPGERATLSCRASQFIGSRYLAWYQQKPGQAPRLLIYGASNRATGVPARFSGSGSGTD |
| | | FTLTISSLEPEDFATYYCQQYYDYPQTFGQGTKVEIKGGGGSGGGGSGGGGSGGGGSQVQLKESGPALVKPTQTL |
| | | TLTCTFSGFSLSNRGGGVGWIRQPPGKALEWLAWIDWDDDKSYSTSLKTRLTISKDTSKNQVVLTMTNMDPVDT |
| | | ATYYCARFHLPLVFDSWGQGTLVTVSSAAA |
| SEQ ID NO: 278 | 801T NTDNA | caggttcaattggttgaaagcggtggtggtctggttcagcctggtggtagcctgcgtctgagctgtgcagcaagcggttttacctttagcgattatg |
| | | tgatgaattgggttcgtcaggcaccgggtaaaggtctggaatgggttgccggtattagctggtcaggtgttaatacccattatgcagatagcgtg |
| | | aaaggtcgttttaccattagccgtgataatagcaaaaataccctgtatctgcagatgaatagcctgcgtgcagaagataccgcagtttattattgt |
| | | gcacgtctgggtgcaaccgcaaataatattcgctataaatttatggatgtgtggggtcagggtacactagttaccgttagcagtggtggtggcgg |
| | | cagcggcggtggcggttccggcggtggtggcagcggtggtggtggtagcgatatcgaactgacccagcctccgagcgttagcgttgcaccgggt |
| | | cagaccgcacgtattagctgtagcggtgatagtctgcgtaataaagtttattggtatcagcagaaaccgggtcaggctccggttctggttatttat |
| | | aaaaataatcgtccgagcggtattccggaacgttttagcggtagcaatagcggtaataccgcaaccctgaccattagcggcacccaggcagaa |
| | | gatgaagccgattattattgtcagagctatgatggtcagaaaagcctggtttttggtggtggcaccaagcttaccgttctggcggcgagcgacgct |
| | | cacaagagcgaagtggcacataggttcaaagatctgggcgaagagaactttaaggccctcgtcctgatcgctttcgcacagtacctccagcagt |
| | | ctccctttgaagatcacgtgaaactggtcaatgaggtgaccgaatttgccaagacatgcgtggctgatgagagtgcagaaaactgtgacaaatc |
| | | actgcatactctctttggagataagctgtgcaccgtcgccacactcagagagacttatggggaaatggctgactgttgcgcaaaacaggagcct |
| | | gaacggaatgagtgtttcctccagcacaaggatgacaacccaaatctgccccgcctcgtgcgacctgaggtcgatgtgatgtgcaccgcctttca |
| | | tgacaacgaagagacattcctgaagaaatacctgtatgaaattgctcgtaggcacccatacttttatgcccccgagctcctgttctttgcaaagag |
| | | atacaaagctgccttcactgaatgttgccaggcagctgataaggccgcatgtctcctgcctaaactggacgagctccgggatgaaggtaaggctt |
| | | ccagcgccaaacagcgcctgaagtgcgcttctctccagaagtttggcgagcgagcattcaaagcctgggctgtggcccgtctcagtcagaggttt |
| | | ccaaaggcagaatttgctgaggtctcaaaactggtgaccgacctcacaaaggtccatactgagtgttgccacggagatctgctggaatgtgccg |
| | | acgatagagcagacctcgctaaatatatctgcgagaatcaggattccattagctctaagctgaaagaatgttgcgagaagcccctcctggaaaa |
| | | gagtcattgtatcgccgaggtggaaaacgacgagatgccagcagatctgccatcactcgctgccgactttgtggaatccaaagatgtctgcaag |
| | | aattacgcagaggctaaagacgtgttcctggggatgtttctgtatgagtacgcccggcgtcaccccgattatagcgtcgtgctcctgctccgactg |
| | | gcaaagacctacgaaacaactctggagaaatgttgcgctgccgcagaccctcatgaatgttatgctaaggtgttcgatgagtttaagccactcgt |
| | | cgaagagccccagaacctgattaaacagaattgcgaactgttcgagcagctcggtgaatacaagtttcagaacgccctgctcgtgcgttatacc |
| | | aaaaaggtccctcaggtgtctacaccaactctggtggaggtcagtaggaatctgggcaaagtgggatcaaagtgttgcaaacaccccgaggca |
| | | aagagaatgccttgtgctgaagattacctctccgtcgtgctgaaccagctctgcgtgctgcatgaaaagaccccagtcagcgatcgggtgacaa |
| | | aatgttgcaccgaatctctggtcaatcgccgaccctgtttcagtgccctcgaagtggacgaaacttatgtgcctaaggagtttcaggctgaaacat |
| | | tcacctttcacgccgatatctgcactctgtccgagaaagaaaggcagattaagaaacagacagcactggtcgagctcgtgaagcataaaccaa |
| | | aggctaccaaggagcagctgaaagccgtcatggacgatttcgcagcttttgtggaaaagtgttgcaaagccgacgataaggagacttgtttcgc |
| | | agaagaggggaaaaagctcgtggctgccagccaggcagctctgggtctggcggcggcgctggatatcgtgctgacacagagccctgccaccct |
| | | gtctctgagccctggcgagagagccaccctgagctgccgggccagccagttcatcggctcccgctacctggcctggtatcagcagaagcccgga |
| | | caggctcccagactgctgatctacggcgccagcaacagagctaccggcgtgcccgccagattttctggcagcggcagcggcaccgacttcaccc |
| | | tgaccatcagcagcctggaacccgaggacttcgccacctactactgccagcagtactacgactacccccagaccttcggccagggcaccaaggt |
| | | ggagatcaagggcggaggcggaagcgggggtggcggaagtggaggcggaggaagcggagggggcggaagccaggtgcaattgaaagagt |
| | | ccggccctgccctggtgaagcctacccagaccctgaccctgacatgcaccttcagcggcttcagcctgagcaacagaggcggcggagtgggctg |
| | | gatcagacagcctcccggcaaggccctggaatggctggcctggatcgactgggacgacgacaagagctacagcaccagcctgaaaacccggc |
| | | tgaccatctccaaggacaccagcaagaaccaggtggtgctcaccatgaccaacatggaccccgtggacaccgccacctattattgcgcccggtt |
| | | tcatctgcccctggtgttcgatagctggggccagggaaccctggtgacagtgtccagcgcggccgca |
| 802T NT | | |
| SEQ ID NO: 279 | 802T NT | DIVLTQSPATLSLSPGERATLSCRASQFIGSRYLAWYQQKPGQAPRLLIYGASNRATGVPARFSGSGSGTDFTLTISSL |
| | | EPEDFATYYCQQYYDYPQTFGQGTKVEIKGGGGSGGGGSGGGGSGGGGSQVQLKESGPALVKPTQTLTLTCTFS |
| | | GFSLSNRGGGVGWIRQPPGKALEWLAWIDWDDDKSYSTSLKTRLTISKDTSKNQVVLTMTNMDPVDTATYYCAR |
| | | FHLPLVFDSWGQGTLVTVSSAASDAHKSEVAHRFKDLGEENFKALVLIAFAQYLQQSPFEDHVKLVNEVTEFAKTC |
| | | VADESAENCDKSLHTLFGDKLCTVATLRETYGEMADCCAKQEPERNECFLQHKDDNPNLPRLVRPEVDVMCTAF |
| | | HDNEETFLKKYLYEIARRHPYFYAPELLFFAKRYKAAFTECCQAADKAACLLPKLDELRDEGKASSAKQRLKCASLQK |
| | | FGERAFKAWAVARLSQRFPKAEFAEVSKLVTDLTKVHTECCHGDLLECADDRADLAKYICENQDSISSKLKECCEKP |
| | | LLEKSHCIAEVENDEMPADLPSLAADFVESKDVCKNYAEAKDVFLGMFLYEYARRHPDYSVVLLLRLAKTYETTLEKC |
| | | CAAADPHECYAKVFDEFKPLVEEPQNLIKQNCELFEQLGEYKFQNALLVRYTKKVPQVSTPTLVEVSRNLGKVGSKC |
| | | CKHPEAKRMPCAEDYLSVVLNQLCVLHEKTPVSDRVTKCCTESLVNRRPCFSALEVDETYVPKEFQAETFTFHADIC |
| | | TLSEKERQIKKQTALVELVKHKPKATKEQLKAVMDDFAAFVEKCCKADDKETCFAEEGKKLVAASQAALGLAAALQ |
| | | VQLVESGGGLVQPGGSLRLSCAASGFTFSDYVMNWVRQAPGKGLEWVAGISWSGVNTHYADSVKGRFTISRDN |
| | | SKNTLYLQMNSLRAEDTAVYYCARLGATANNIRYKFMDVWGQGTLVTVSSGGGGSGGGGSGGGGSGGGGSDIE |
| | | LTQPPSVSVAPGQTARISCSGDSLRNKVYWYQQKPGQAPVLVIYKNNRPSGIPERFSGSNSGNTATLTISGTQAED |
| | | EADYYCQSYDGQKSLVFGGGTKLTVLAAA |
| SEQ ID NO: 280 | 802T NT | gatatcgtgctgacacagagccctgccaccctgtctctgagccctggcgagagagccaccctgagctgccgggccagccagttcatcggctccc |
| | | gctacctggcctggtatcagcagaagcccggacaggctcccagactgctgatctacggcgccagcaacagagctaccggcgtgcccgccagatt |
| | | ttctggcagcggcagcggcaccgacttcaccctgaccatcagcagcctggaacccgaggacttcgccacctactactgccagcagtactacgac |
| | | tacccccagaccttcggccagggcaccaaggtggagatcaagggcggaggcggaagcgggggtggcggaagtggaggcggaggaagcgga |
| | | gggggcggaagccaggtgcaattgaaagagtccggccctgccctggtgaagcctacccagaccctgaccctgacatgcaccttcagcggcttca |
| | | gcctgagcaacagaggcggcggagtgggctggatcagacagcctcccggcaaggccctggaatggctggcctggatcgactgggacgacgac |
| | | aagagctacagcaccagcctgaaaacccggctgaccatctccaaggacaccagcaagaaccaggtggtgctcaccatgaccaacatggaccc |
| | | cgtggacaccgccacctattattgcgcccggtttcatctgcccctggtgttcgatagctggggccagggaaccctggtgacagtgtccagcgcgg |
| | | cgagcgacgctcacaagagcgaagtggcacataggttcaaagatctgggcgaagagaactttaaggccctcgtcctgatcgctttcgcacagta |
| | | cctccagcagtctccctttgaagatcacgtgaaactggtcaatgaggtgaccgaatttgccaagacatgcgtggctgatgagagtgcagaaaac |
| | | tgtgacaaatcactgcatactctctttggagataagctgtgcaccgtcgccacactcagagagacttatggggaaatggctgactgttgcgcaaa |
| | | acaggagcctgaacggaatgagtgtttcctccagcacaaggatgacaacccaaatctgccccgcctcgtgcgacctgaggtcgatgtgatgtgc |
| | | accgcctttcatgacaacgaagagacattcctgaagaaatacctgtatgaaattgctcgtaggcacccatacttttatgcccccgagctcctgttc |
| | | tttgcaaagagatacaaagctgccttcactgaatgttgccaggcagctgataaggccgcatgtctcctgcctaaactggacgagctccgggatga |
| | | aggtaaggcttccagcgccaaacagcgcctgaagtgcgcttctctccagaagtttggcgagcgagcattcaaagcctgggctgtggcccgtctc |
| | | agtcagaggtttccaaaggcagaatttgctgaggtctcaaaactggtgaccgacctcacaaaggtccatactgagtgttgccacggagatctgct |
| | | ggaatgtgccgacgatagagcagacctcgctaaatatatctgcgagaatcaggattccattagctctaagctgaaagaatgttgcgagaagccc |
| | | ctcctggaaaagagtcattgtatcgccgaggtggaaaacgacgagatgccagcagatctgccatcactcgctgccgactttgtggaatccaaag |
| | | atgtctgcaagaattacgcagaggctaaagacgtgttcctggggatgtttctgtatgagtacgcccggcgtcaccccgattatagcgtcgtgctcc |
| | | tgctccgactggcaaagacctacgaaacaactctggagaaatgttgcgctgccgcagaccctcatgaatgttatgctaaggtgttcgatgagttt |
| | | aagccactcgtcgaagagccccagaacctgattaaacagaattgcgaactgttcgagcagctcggtgaatacaagtttcagaacgccctgctcg |
| | | tgcgttataccaaaaaggtccctcaggtgtctacaccaactctggtggaggtcagtaggaatctgggcaaagtgggatcaaagtgttgcaaaca |
| | | ccccgaggcaaagagaatgccttgtgctgaagattacctctccgtcgtgctgaaccagctctgcgtgctgcatgaaaagaccccagtcagcgat |
| | | cgggtgacaaaatgttgcaccgaatctctggtcaatcgccgaccctgtttcagtgccctcgaagtggacgaaacttatgtgcctaaggagtttca |
| | | ggctgaaacattcacctttcacgccgatatctgcactctgtccgagaaagaaaggcagattaagaaacagacagcactggtcgagctcgtgaa |
| | | gcataaaccaaaggctaccaaggagcagctgaaagccgtcatggacgatttcgcagcttttgtggaaaagtgttgcaaagccgacgataagga |
| | | gacttgtttcgcagaagaggggaaaaagctcgtggctgccagccaggcagctctgggtctggcggcggcgctgcaggttcaattggttgaaagc |
| | | ggtggtggtctggttcagcctggtggtagcctgcgtctgagctgtgcagcaagcggttttacctttagcgattatgtgatgaattgggttcgtcagg |
| | | caccgggtaaaggtctggaatgggttgccggtattagctggtcaggtgttaatacccattatgcagatagcgtgaaaggtcgttttaccattagcc |
| | | gtgataatagcaaaaataccctgtatctgcagatgaatagcctgcgtgcagaagataccgcagtttattattgtgcacgtctgggtgcaaccgca |
| | | aataatattcgctataaatttatggatgtgtggggtcagggtacactagttaccgttagcagtggtggtggcggcagcggcggtggcggttccgg |
| | | cggtggtggcagcggtggtggtggtagcgatatcgaactgacccagcctccgagcgttagcgttgcaccgggtcagaccgcacgtattagctgt |
| | | agcggtgatagtctgcgtaataaagtttattggtatcagcagaaaccgggtcaggctccggttctggttatttataaaaataatcgtccgagcggt |
| | | attccggaacgttttagcggtagcaatagcggtaataccgcaaccctgaccattagcggcacccaggcagaagatgaagccgattattattgtc |
| | | agagctatgatggtcagaaaagcctggtttttggtggtggcaccaagcttaccgttctggcggccgca |
| 802T NL | | |
| SEQ ID NO: 281 | 802T NL | DIVLTQSPATLSLSPGERATLSCRASQFIGSRYLAWYQQKPGQAPRLLIYGASNRATGVPARFSGSGSGTDFTLTISSL |
| | | EPEDFATYYCQQYYDYPQTFGQGTKVEIKGGGGSGGGGSGGGGSGGGGSQVQLKESGPALVKPTQTLTLTCTFS |
| | | GFSLSNRGGGVGWIRQPPGKALEWLAWIDWDDDKSYSTSLKTRLTISKDTSKNQVVLTMTNMDPVDTATYYCAR |
| | | FHLPLVFDSWGQGTLVTVSSDAHKSEVAHRFKDLGEENFKALVLIAFAQYLQQSPFEDHVKLVNEVTEFAKTCVAD |
| | | ESAENCDKSLHTLFGDKLCTVATLRETYGEMADCCAKQEPERNECFLQHKDDNPNLPRLVRPEVDVMCTAFHDN |
| | | EETFLKKYLYEIARRHPYFYAPELLFFAKRYKAAFTECCQAADKAACLLPKLDELRDEGKASSAKQRLKCASLQKFGER |
| | | AFKAWAVARLSQRFPKAEFAEVSKLVTDLTKVHTECCHGDLLECADDRADLAKYICENQDSISSKLKECCEKPLLEKS |
| | | HCIAEVENDEMPADLPSLAADFVESKDVCKNYAEAKDVFLGMFLYEYARRHPDYSVVLLLRLAKTYETTLEKCCAAA |
| | | DPHECYAKVFDEFKPLVEEPQNLIKQNCELFEQLGEYKFQNALLVRYTKKVPQVSTPTLVEVSRNLGKVGSKCCKHP |
| | | EAKRMPCAEDYLSVVLNQLCVLHEKTPVSDRVTKCCTESLVNRRPCFSALEVDETYVPKEFQAETFTFHADICTLSEK |
| | | ERQIKKQTALVELVKHKPKATKEQLKAVMDDFAAFVEKCCKADDKETCFAEEGKKLVAASQAALGLQVQLVESGG |
| | | GLVQPGGSLRLSCAASGFTFSDYVMNWVRQAPGKGLEWVAGISWSGVNTHYADSVKGRFTISRDNSKNTLYLQ |
| | | MNSLRAEDTAVYYCARLGATANNIRYKFMDVWGQGTLVTVSSGGGGSGGGGSGGGGSGGGGSDIELTQPPSVS |
| | | VAPGQTARISCSGDSLRNKVYWYQQKPGQAPVLVIYKNNRPSGIPERFSGSNSGNTATLTISGTQAEDEADYYCQS |
| | | YDGQKSLVFGGGTKLTVLAAAENLYFQGSHHHHHH |
| SEQ ID NO: 282 | 802T NL DNA | gatatcgtgctgacacagagccctgccaccctgtctctgagccctggcgagagagccaccctgagctgccgggccagccagttcatcggctccc |
| | | gctacctggcctggtatcagcagaagcccggacaggctcccagactgctgatctacggcgccagcaacagagctaccggcgtgcccgccagatt |
| | | ttctggcagcggcagcggcaccgacttcaccctgaccatcagcagcctggaacccgaggacttcgccacctactactgccagcagtactacgac |
| | | tacccccagaccttcggccagggcaccaaggtggagatcaagggcggaggcggaagcgggggtggcggaagtggaggcggaggaagcgga |
| | | gggggcggaagccaggtgcaattgaaagagtccggccctgccctggtgaagcctacccagaccctgaccctgacatgcaccttcagcggcttca |
| | | gcctgagcaacagaggcggcggagtgggctggatcagacagcctcccggcaaggccctggaatggctggcctggatcgactgggacgacgac |
| | | aagagctacagcaccagcctgaaaacccggctgaccatctccaaggacaccagcaagaaccaggtggtgctcaccatgaccaacatggaccc |
| | | cgtggacaccgccacctattattgcgcccggtttcatctgcccctggtgttcgatagctggggccagggaaccctggtgacagtgtccagcgacg |
| | | ctcacaagagcgaagtggcacataggttcaaagatctgggcgaagagaactttaaggccctcgtcctgatcgctttcgcacagtacctccagca |
| | | gtctccctttgaagatcacgtgaaactggtcaatgaggtgaccgaatttgccaagacatgcgtggctgatgagagtgcagaaaactgtgacaaa |
| | | tcactgcatactctctttggagataagctgtgcaccgtcgccacactcagagagacttatggggaaatggctgactgttgcgcaaaacaggagcc |
| | | tgaacggaatgagtgtttcctccagcacaaggatgacaacccaaatctgccccgcctcgtgcgacctgaggtcgatgtgatgtgcaccgcctttc |
| | | atgacaacgaagagacattcctgaagaaatacctgtatgaaattgctcgtaggcacccatacttttatgcccccgagctcctgttctttgcaaaga |
| | | gatacaaagctgccttcactgaatgttgccaggcagctgataaggccgcatgtctcctgcctaaactggacgagctccgggatgaaggtaaggc |
| | | ttccagcgccaaacagcgcctgaagtgcgcttctctccagaagtttggcgagcgagcattcaaagcctgggctgtggcccgtctcagtcagaggt |
| | | ttccaaaggcagaatttgctgaggtctcaaaactggtgaccgacctcacaaaggtccatactgagtgttgccacggagatctgctggaatgtgcc |
| | | gacgatagagcagacctcgctaaatatatctgcgagaatcaggattccattagctctaagctgaaagaatgttgcgagaagcccctcctggaaa |
| | | agagtcattgtatcgccgaggtggaaaacgacgagatgccagcagatctgccatcactcgctgccgactttgtggaatccaaagatgtctgcaa |
| | | gaattacgcagaggctaaagacgtgttcctggggatgtttctgtatgagtacgcccggcgtcaccccgattatagcgtcgtgctcctgctccgact |
| | | ggcaaagacctacgaaacaactctggagaaatgttgcgctgccgcagaccctcatgaatgttatgctaaggtgttcgatgagtttaagccactcg |
| | | tcgaagagccccagaacctgattaaacagaattgcgaactgttcgagcagctcggtgaatacaagtttcagaacgccctgctcgtgcgttatacc |
| | | aaaaaggtccctcaggtgtctacaccaactctggtggaggtcagtaggaatctgggcaaagtgggatcaaagtgttgcaaacaccccgaggca |
| | | aagagaatgccttgtgctgaagattacctctccgtcgtgctgaaccagctctgcgtgctgcatgaaaagaccccagtcagcgatcgggtgacaa |
| | | aatgttgcaccgaatctctggtcaatcgccgaccctgtttcagtgccctcgaagtggacgaaacttatgtgcctaaggagtttcaggctgaaacat |
| | | tcacctttcacgccgatatctgcactctgtccgagaaagaaaggcagattaagaaacagacagcactggtcgagctcgtgaagcataaaccaa |
| | | aggctaccaaggagcagctgaaagccgtcatggacgatttcgcagcttttgtggaaaagtgttgcaaagccgacgataaggagacttgtttcgc |
| | | agaagaggggaaaaagctcgtggctgccagccaggcagctctgggtctgcaggttcaattggttgaaagcggtggtggtctggttcagcctggt |
| | | ggtagcctgcgtctgagctgtgcagcaagcggttttacctttagcgattatgtgatgaattgggttcgtcaggcaccgggtaaaggtctggaatgg |
| | | gttgccggtattagctggtcaggtgttaatacccattatgcagatagcgtgaaaggtcgttttaccattagccgtgataatagcaaaaataccctg |
| | | tatctgcagatgaatagcctgcgtgcagaagataccgcagtttattattgtgcacgtctgggtgcaaccgcaaataatattcgctataaatttatg |
| | | gatgtgtggggtcagggtacactagttaccgttagcagtggtggtggcggcagcggcggtggcggttccggcggtggtggcagcggtggtggtg |
| | | gtagcgatatcgaactgacccagcctccgagcgttagcgttgcaccgggtcagaccgcacgtattagctgtagcggtgatagtctgcgtaataaa |
| | | gtttattggtatcagcagaaaccgggtcaggctccggttctggttatttataaaaataatcgtccgagcggtattccggaacgttttagcggtagc |
| | | aatagcggtaataccgcaaccctgaccattagcggcacccaggcagaagatgaagccgattattattgtcagagctatgatggtcagaaaagc |
| | | ctggtttttggtggtggcaccaagcttaccgttctggcggccgcagagaacctgtattttcagggtagccaccatcatcaccatcac |
| 808T | | |
| SEQ ID NO: 283 | 808T | DIVLTQSPATLSLSPGERATLSCRASQFIGSRYLAWYQQKPGQAPRLLIYGASNRATGVPARFSGSGSGTDFTLTISSL |
| | | EPEDFATYYCQQYYDYPQTFGQGTKVEIKGGGGSGGGGSGGGGSGGGGSQVQLKESGPALVKPTQTLTLTCTFS |
| | | GFSLSNRGGGVGWIRQPPGKALEWLAWIDWDDDKSYSTSLKTRLTISKDTSKNQVVLTMTNMDPVDTATYYCAR |
| | | FHLPLVFDSWGQGTLVTVSSKTHTDAHKSEVAHRFKDLGEENFKALVLIAFAQYLQQSPFEDHVKLVNEVTEFAKT |
| | | CVADESAENCDKSLHTLFGDKLCTVATLRETYGEMADCCAKQEPERNECFLQHKDDNPNLPRLVRPEVDVMCTAF |
| | | HDNEETFLKKYLYEIARRHPYFYAPELLFFAKRYKAAFTECCQAADKAACLLPKLDELRDEGKASSAKQRLKCASLQK |
| | | FGERAFKAWAVARLSQRFPKAEFAEVSKLVTDLTKVHTECCHGDLLECADDRADLAKYICENQDSISSKLKECCEKP |
| | | LLEKSHCIAEVENDEMPADLPSLAADFVESKDVCKNYAEAKDVFLGMFLYEYARRHPDYSVVLLLRLAKTYETTLEKC |
| | | CAAADPHECYAKVFDEFKPLVEEPQNLIKQNCELFEQLGEYKFQNALLVRYTKKVPQVSTPTLVEVSRNLGKVGSKC |
| | | CKHPEAKRMPCAEDYLSVVLNQLCVLHEKTPVSDRVTKCCTESLVNRRPCFSALEVDETYVPKEFQAETFTFHADIC |
| | | TLSEKERQIKKQTALVELVKHKPKATKEQLKAVMDDFAAFVEKCCKADDKETCFAEEGKKLVAASQAALGLKTHTQ |
| | | VQLVESGGGLVQPGGSLRLSCAASGFTFSDYVMNWVRQAPGKGLEWVAGISWSGVNTHYADSVKGRFTISRDN |
| | | SKNTLYLQMNSLRAEDTAVYYCARLGATANNIRYKFMDVWGQGTLVTVSSGGGGSGGGGSGGGGSGGGGSDIE |
| | | LTQPPSVSVAPGQTARISCSGDSLRNKVYWYQQKPGQAPVLVIYKNNRPSGIPERFSGSNSGNTATLTISGTQAED |
| | | EADYYCQSYDGQKSLVFGGGTKLTVLAAAENLYFQGSHHHHHH |
| SEQ ID NO: 284 | 808T DNA | gatatcgtgctgacacagagccctgccaccctgtctctgagccctggcgagagagccaccctgagctgccgggccagccagttcatcggctccc |
| | | gctacctggcctggtatcagcagaagcccggacaggctcccagactgctgatctacggcgccagcaacagagctaccggcgtgcccgccagatt |
| | | ttctggcagcggcagcggcaccgacttcaccctgaccatcagcagcctggaacccgaggacttcgccacctactactgccagcagtactacgac |
| | | tacccccagaccttcggccagggcaccaaggtggagatcaagggcggaggcggaagcgggggtggcggaagtggaggcggaggaagcgga |
| | | gggggcggaagccaggtgcaattgaaagagtccggccctgccctggtgaagcctacccagaccctgaccctgacatgcaccttcagcggcttca |
| | | gcctgagcaacagaggcggcggagtgggctggatcagacagcctcccggcaaggccctggaatggctggcctggatcgactgggacgacgac |
| | | aagagctacagcaccagcctgaaaacccggctgaccatctccaaggacaccagcaagaaccaggtggtgctcaccatgaccaacatggaccc |
| | | cgtggacaccgccacctattattgcgcccggtttcatctgcccctggtgttcgatagctggggccagggaaccctggtgacagtgtccagcaaga |
| | | cccacaccgacgctcacaagagcgaagtggcacataggttcaaagatctgggcgaagagaactttaaggccctcgtcctgatcgctttcgcaca |
| | | gtacctccagcagtctccctttgaagatcacgtgaaactggtcaatgaggtgaccgaatttgccaagacatgcgtggctgatgagagtgcagaa |
| | | aactgtgacaaatcactgcatactctctttggagataagctgtgcaccgtcgccacactcagagagacttatggggaaatggctgactgttgcgc |
| | | aaaacaggagcctgaacggaatgagtgtttcctccagcacaaggatgacaacccaaatctgccccgcctcgtgcgacctgaggtcgatgtgatg |
| | | tgcaccgcctttcatgacaacgaagagacattcctgaagaaatacctgtatgaaattgctcgtaggcacccatacttttatgcccccgagctcctg |
| | | ttctttgcaaagagatacaaagctgccttcactgaatgttgccaggcagctgataaggccgcatgtctcctgcctaaactggacgagctccggga |
| | | tgaaggtaaggcttccagcgccaaacagcgcctgaagtgcgcttctctccagaagtttggcgagcgagcattcaaagcctgggctgtggcccgt |
| | | ctcagtcagaggtttccaaaggcagaatttgctgaggtctcaaaactggtgaccgacctcacaaaggtccatactgagtgttgccacggagatct |
| | | gctggaatgtgccgacgatagagcagacctcgctaaatatatctgcgagaatcaggattccattagctctaagctgaaagaatgttgcgagaag |
| | | cccctcctggaaaagagtcattgtatcgccgaggtggaaaacgacgagatgccagcagatctgccatcactcgctgccgactttgtggaatcca |
| | | aagatgtctgcaagaattacgcagaggctaaagacgtgttcctggggatgtttctgtatgagtacgcccggcgtcaccccgattatagcgtcgtg |
| | | ctcctgctccgactggcaaagacctacgaaacaactctggagaaatgttgcgctgccgcagaccctcatgaatgttatgctaaggtgttcgatga |
| | | gtttaagccactcgtcgaagagccccagaacctgattaaacagaattgcgaactgttcgagcagctcggtgaatacaagtttcagaacgccctg |
| | | ctcgtgcgttataccaaaaaggtccctcaggtgtctacaccaactctggtggaggtcagtaggaatctgggcaaagtgggatcaaagtgttgca |
| | | aacaccccgaggcaaagagaatgccttgtgctgaagattacctctccgtcgtgctgaaccagctctgcgtgctgcatgaaaagaccccagtcag |
| | | cgatcgggtgacaaaatgttgcaccgaatctctggtcaatcgccgaccctgtttcagtgccctcgaagtggacgaaacttatgtgcctaaggagt |
| | | ttcaggctgaaacattcacctttcacgccgatatctgcactctgtccgagaaagaaaggcagattaagaaacagacagcactggtcgagctcgt |
| | | gaagcataaaccaaaggctaccaaggagcagctgaaagccgtcatggacgatttcgcagcttttgtggaaaagtgttgcaaagccgacgataa |
| | | ggagacttgtttcgcagaagaggggaaaaagctcgtggctgccagccaggcagctctgggtctgaagacccacacccaggttcaattggttga |
| | | aagcggtggtggtctggttcagcctggtggtagcctgcgtctgagctgtgcagcaagcggttttacctttagcgattatgtgatgaattgggttcgt |
| | | caggcaccgggtaaaggtctggaatgggttgccggtattagctggtcaggtgttaatacccattatgcagatagcgtgaaaggtcgttttaccatt |
| | | agccgtgataatagcaaaaataccctgtatctgcagatgaatagcctgcgtgcagaagataccgcagtttattattgtgcacgtctgggtgcaac |
| | | cgcaaataatattcgctataaatttatggatgtgtggggtcagggtacactagttaccgttagcagtggtggtggcggcagcggcggtggcggtt |
| | | ccggcggtggtggcagcggtggtggtggtagcgatatcgaactgacccagcctccgagcgttagcgttgcaccgggtcagaccgcacgtattag |
| | | ctgtagcggtgatagtctgcgtaataaagtttattggtatcagcagaaaccgggtcaggctccggttctggttatttataaaaataatcgtccgag |
| | | cggtattccggaacgttttagcggtagcaatagcggtaataccgcaaccctgaccattagcggcacccaggcagaagatgaagccgattattat |
| | | tgtcagagctatgatggtcagaaaagcctggtttttggtggtggcaccaagcttaccgttctggcggccgcagagaacctgtattttcagggtagc |
| | | caccatcatcaccatcac |
| 812T | | |
| SEQ ID NO: 285 | 812T | DIVLTQSPATLSLSPGERATLSCRASQFIGSRYLAWYQQKPGQAPRLLIYGASNRATGVPARFSGSGSGTDFTLTISSL |
| | | EPEDFATYYCQQYYDYPQTFGQGTKVEIKGGGGSGGGGSGGGGSGGGGSQVQLKESGPALVKPTQTLTLTCTFS |
| | | GFSLSNRGGGVGWIRQPPGKALEWLAWIDWDDDKSYSTSLKTRLTISKDTSKNQVVLTMTNMDPVDTATYYCAR |
| | | FHLPLVFDSWGQGTLVTVSSGGGGSGGGGSGGGGSQVQLVESGGGLVQPGGSLRLSCAASGFTFSDYVMNWV |
| | | RQAPGKGLEWVAGISWSGVNTHYADSVKGRFTISRDNSKNTLYLQMNSLRAEDTAVYYCARLGATANNIRYKFM |
| | | DVWGQGTLVTVSSGGGGSGGGGSGGGGSGGGGSDIELTQPPSVSVAPGQTARISCSGDSLRNKVYWYQQKPG |
| | | QAPVLVIYKNNRPSGIPERFSGSNSGNTATLTISGTQAEDEADYYCQSYDGQKSLVFGGGTKLTVLAAAENLYFQGS |
| | | HHHHHH |
| SEQ ID NO: 286 | 812T DNA | gatatcgtgctgacacagagccctgccaccctgtctctgagccctggcgagagagccaccctgagctgccgggccagccagttcatcggctccc |
| | | gctacctggcctggtatcagcagaagcccggacaggctcccagactgctgatctacggcgccagcaacagagctaccggcgtgcccgccagatt |
| | | ttctggcagcggcagcggcaccgacttcaccctgaccatcagcagcctggaacccgaggacttcgccacctactactgccagcagtactacgac |
| | | tacccccagaccttcggccagggcaccaaggtggagatcaagggcggaggcggaagcgggggtggcggaagtggaggcggaggaagcgga |
| | | gggggcggaagccaggtgcaattgaaagagtccggccctgccctggtgaagcctacccagaccctgaccctgacatgcaccttcagcggcttca |
| | | gcctgagcaacagaggcggcggagtgggctggatcagacagcctcccggcaaggccctggaatggctggcctggatcgactgggacgacgac |
| | | aagagctacagcaccagcctgaaaacccggctgaccatctccaaggacaccagcaagaaccaggtggtgctcaccatgaccaacatggaccc |
| | | cgtggacaccgccacctattattgcgcccggtttcatctgcccctggtgttcgatagctggggccagggaaccctggtgacagtgtccagcggag |
| | | gtggcgggagtggtggagggggctcaggcgggggtggatctcaggttcaattggttgaaagcggtggtggtctggttcagcctggtggtagcct |
| | | gcgtctgagctgtgcagcaagcggttttacctttagcgattatgtgatgaattgggttcgtcaggcaccgggtaaaggtctggaatgggttgccgg |
| | | tattagctggtcaggtgttaatacccattatgcagatagcgtgaaaggtcgttttaccattagccgtgataatagcaaaaataccctgtatctgca |
| | | gatgaatagcctgcgtgcagaagataccgcagtttattattgtgcacgtctgggtgcaaccgcaaataatattcgctataaatttatggatgtgtg |
| | | gggtcagggtacactagttaccgttagcagtggtggtggcggcagcggcggtggcggttccggcggtggtggcagcggtggtggtggtagcgat |
| | | atcgaactgacccagcctccgagcgttagcgttgcaccgggtcagaccgcacgtattagctgtagcggtgatagtctgcgtaataaagtttattg |
| | | gtatcagcagaaaccgggtcaggctccggttctggttatttataaaaataatcgtccgagcggtattccggaacgttttagcggtagcaatagcg |
| | | gtaataccgcaaccctgaccattagcggcacccaggcagaagatgaagccgattattattgtcagagctatgatggtcagaaaagcctggttttt |
| | | ggtggtggcaccaagcttaccgttctggcggccgcagagaacctgtattttcagggtagccaccatcatcaccatcac |
| 812T-HSA | | |
| SEQ ID NO: 287 | 812T-HSA | DIVLTQSPATLSLSPGERATLSCRASQFIGSRYLAWYQQKPGQAPRLLIYGASNRATGVPARFSGSGSGTDFTLTISSL |
| | | EPEDFATYYCQQYYDYPQTFGQGTKVEIKGGGGSGGGGSGGGGSGGGGSQVQLKESGPALVKPTQTLTLTCTFS |
| | | GFSLSNRGGGVGWIRQPPGKALEWLAWIDWDDDKSYSTSLKTRLTISKDTSKNQVVLTMTNMDPVDTATYYCAR |
| | | FHLPLVFDSWGQGTLVTVSSGGGGSGGGGSGGGGSQVQLVESGGGLVQPGGSLRLSCAASGFTFSDYVMNWV |
| | | RQAPGKGLEWVAGISWSGVNTHYADSVKGRFTISRDNSKNTLYLQMNSLRAEDTAVYYCARLGATANNIRYKFM |
| | | DVWGQGTLVTVSSGGGGSGGGGSGGGGSGGGGSDIELTQPPSVSVAPGQTARISCSGDSLRNKVYWYQQKPG |
| | | QAPVLVIYKNNRPSGIPERFSGSNSGNTATLTISGTQAEDEADYYCQSYDGQKSLVFGGGTKLTVLDKTHTDAHKSE |
| | | VAHRFKDLGEENFKALVLIAFAQYLQQSPFEDHVKLVNEVTEFAKTCVADESAENCDKSLHTLFGDKLCTVATLRET |
| | | YGEMADCCAKQEPERNECFLQHKDDNPNLPRLVRPEVDVMCTAFHDNEETFLKKYLYEIARRHPYFYAPELLFFAK |
| | | RYKAAFTECCQAADKAACLLPKLDELRDEGKASSAKQRLKCASLQKFGERAFKAWAVARLSQRFPKAEFAEVSKLV |
| | | TDLTKVHTECCHGDLLECADDRADLAKYICENQDSISSKLKECCEKPLLEKSHCIAEVENDEMPADLPSLAADFVESK |
| | | DVCKNYAEAKDVFLGMFLYEYARRHPDYSVVLLLRLAKTYETTLEKCCAAADPHECYAKVFDEFKPLVEEPQNLIKQ |
| | | NCELFEQLGEYKFQNALLVRYTKKVPQVSTPTLVEVSRNLGKVGSKCCKHPEAKRMPCAEDYLSVVLNQLCVLHEK |
| | | TPVSDRVTKCCTESLVNRRPCFSALEVDETYVPKEFQAETFTFHADICTLSEKERQIKKQTALVELVKHKPKATKEQLK |
| | | AVMDDFAAFVEKCCKADDKETCFAEEGKKLVAASQAALGLAAAHHHHHH |
| SEQ ID NO: 288 | 812T-HSA DNA | gatatcgtgctgacacagagccctgccaccctgtctctgagccctggcgagagagccaccctgagctgccgggccagccagttcatcggctccc |
| | | gctacctggcctggtatcagcagaagcccggacaggctcccagactgctgatctacggcgccagcaacagagctaccggcgtgcccgccagatt |
| | | ttctggcagcggcagcggcaccgacttcaccctgaccatcagcagcctggaacccgaggacttcgccacctactactgccagcagtactacgac |
| | | tacccccagaccttcggccagggcaccaaggtggagatcaagggcggaggcggaagcgggggtggcggaagtggaggcggaggaagcgga |
| | | gggggcggaagccaggtgcaattgaaagagtccggccctgccctggtgaagcctacccagaccctgaccctgacatgcaccttcagcggcttca |
| | | gcctgagcaacagaggcggcggagtgggctggatcagacagcctcccggcaaggccctggaatggctggcctggatcgactgggacgacgac |
| | | aagagctacagcaccagcctgaaaacccggctgaccatctccaaggacaccagcaagaaccaggtggtgctcaccatgaccaacatggaccc |
| | | cgtggacaccgccacctattattgcgcccggtttcatctgcccctggtgttcgatagctggggccagggaaccctggtgacagtgtccagcggag |
| | | gtggcgggagtggtggagggggctcaggcgggggtggatctcaggttcaattggttgaaagcggtggtggtctggttcagcctggtggtagcct |
| | | gcgtctgagctgtgcagcaagcggttttacctttagcgattatgtgatgaattgggttcgtcaggcaccgggtaaaggtctggaatgggttgccgg |
| | | tattagctggtcaggtgttaatacccattatgcagatagcgtgaaaggtcgttttaccattagccgtgataatagcaaaaataccctgtatctgca |
| | | gatgaatagcctgcgtgcagaagataccgcagtttattattgtgcacgtctgggtgcaaccgcaaataatattcgctataaatttatggatgtgtg |
| | | gggtcagggtacactagttaccgttagcagtggtggtggcggcagcggcggtggcggttccggcggtggtggcagcggtggtggtggtagcgat |
| | | atcgaactgacccagcctccgagcgttagcgttgcaccgggtcagaccgcacgtattagctgtagcggtgatagtctgcgtaataaagtttattg |
| | | gtatcagcagaaaccgggtcaggctccggttctggttatttataaaaataatcgtccgagcggtattccggaacgttttagcggtagcaatagcg |
| | | gtaataccgcaaccctgaccattagcggcacccaggcagaagatgaagccgattattattgtcagagctatgatggtcagaaaagcctggttttt |
| | | ggtggtggcaccaagcttaccgttctggacaagacccacaccgacgctcacaagagcgaagtggcacataggttcaaagatctgggcgaaga |
| | | gaactttaaggccctcgtcctgatcgctttcgcacagtacctccagcagtctccctttgaagatcacgtgaaactggtcaatgaggtgaccgaatt |
| | | tgccaagacatgcgtggctgatgagagtgcagaaaactgtgacaaatcactgcatactctctttggagataagctgtgcaccgtcgccacactc |
| | | agagagacttatggggaaatggctgactgttgcgcaaaacaggagcctgaacggaatgagtgtttcctccagcacaaggatgacaacccaaat |
| | | ctgccccgcctcgtgcgacctgaggtcgatgtgatgtgcaccgcctttcatgacaacgaagagacattcctgaagaaatacctgtatgaaattgc |
| | | tcgtaggcacccatacttttatgcccccgagctcctgttctttgcaaagagatacaaagctgccttcactgaatgttgccaggcagctgataaggc |
| | | cgcatgtctcctgcctaaactggacgagctccgggatgaaggtaaggcttccagcgccaaacagcgcctgaagtgcgcttctctccagaagtttg |
| | | gcgagcgagcattcaaagcctgggctgtggcccgtctcagtcagaggtttccaaaggcagaatttgctgaggtctcaaaactggtgaccgacct |
| | | cacaaaggtccatactgagtgttgccacggagatctgctggaatgtgccgacgatagagcagacctcgctaaatatatctgcgagaatcaggat |
| | | tccattagctctaagctgaaagaatgttgcgagaagcccctcctggaaaagagtcattgtatcgccgaggtggaaaacgacgagatgccagca |
| | | gatctgccatcactcgctgccgactttgtggaatccaaagatgtctgcaagaattacgcagaggctaaagacgtgttcctggggatgtttctgtat |
| | | gagtacgcccggcgtcaccccgattatagcgtcgtgctcctgctccgactggcaaagacctacgaaacaactctggagaaatgttgcgctgccg |
| | | cagaccctcatgaatgttatgctaaggtgttcgatgagtttaagccactcgtcgaagagccccagaacctgattaaacagaattgcgaactgttc |
| | | gagcagctcggtgaatacaagtttcagaacgccctgctcgtgcgttataccaaaaaggtccctcaggtgtctacaccaactctggtggaggtcag |
| | | taggaatctgggcaaagtgggatcaaagtgttgcaaacaccccgaggcaaagagaatgccttgtgctgaagattacctctccgtcgtgctgaac |
| | | cagctctgcgtgctgcatgaaaagaccccagtcagcgatcgggtgacaaaatgttgcaccgaatctctggtcaatcgccgaccctgtttcagtgc |
| | | cctcgaagtggacgaaacttatgtgcctaaggagtttcaggctgaaacattcacctttcacgccgatatctgcactctgtccgagaaagaaaggc |
| | | agattaagaaacagacagcactggtcgagctcgtgaagcataaaccaaaggctaccaaggagcagctgaaagccgtcatggacgatttcgca |
| | | gcttttgtggaaaagtgttgcaaagccgacgataaggagacttgtttcgcagaagaggggaaaaagctcgtggctgccagccaggcagctctg |
| | | ggtctggcagctgcccatcaccaccatcatcat |
| 809T | | |
| SEQ ID NO: 289 | 809T | QVQLVESGGGLVQPGGSLRLSCAASGFTFSDYVMNWVRQAPGKGLEWVAGISWSGVNTHYADSVKGRFTISRD |
| | | NSKNTLYLQMNSLRAEDTAVYYCARLGATANNIRYKFMDVWGQGTLVTVSSGGGGSGGGGSGGGGSGGGGSD |
| | | IELTQPPSVSVAPGQTARISCSGDSLRNKVYWYQQKPGQAPVLVIYKNNRPSGIPERFSGSNSGNTATLTISGTQAE |
| | | DEADYYCQSYDGQKSLVFGGGTKLTVLAASDAHKSEVAHRFKDLGEENFKALVLIAFAQYLQQSPFEDHVKLVNEV |
| | | TEFAKTCVADESAENCDKSLHTLFGDKLCTVATLRETYGEMADCCAKQEPERNECFLQHKDDNPNLPRLVRPEVD |
| | | VMCTAFHDNEETFLKKYLYEIARRHPYFYAPELLFFAKRYKAAFTECCQAADKAACLLPKLDELRDEGKASSAKQRLK |
| | | CASLQKFGERAFKAWAVARLSQRFPKAEFAEVSKLVTDLTKVHTECCHGDLLECADDRADLAKYICENQDSISSKLK |
| | | ECCEKPLLEKSHCIAEVENDEMPADLPSLAADFVESKDVCKNYAEAKDVFLGMFLYEYARRHPDYSVVLLLRLAKTY |
| | | ETTLEKCCAAADPHECYAKVFDEFKPLVEEPQNLIKQNCELFEQLGEYKFQNALLVRYTKKVPQVSTPTLVEVSRNL |
| | | GKVGSKCCKHPEAKRMPCAEDYLSVVLNQLCVLHEKTPVSDRVTKCCTESLVNRRPCFSALEVDETYVPKEFQAETF |
| | | TFHADICTLSEKERQIKKQTALVELVKHKPKATKEQLKAVMDDFAAFVEKCCKADDKETCFAEEGKKLVAASQAAL |
| | | GLAAAENLYFQGSHHHHHH |
| SEQ ID NO: 290 | 809T DNA | caggttcaattggttgaaagcggtggtggtctggttcagcctggtggtagcctgcgtctgagctgtgcagcaagcggttttacctttagcgattatg |
| | | tgatgaattgggttcgtcaggcaccgggtaaaggtctggaatgggttgccggtattagctggtcaggtgttaatacccattatgcagatagcgtg |
| | | aaaggtcgttttaccattagccgtgataatagcaaaaataccctgtatctgcagatgaatagcctgcgtgcagaagataccgcagtttattattgt |
| | | gcacgtctgggtgcaaccgcaaataatattcgctataaatttatggatgtgtggggtcagggtacactagttaccgttagcagtggtggtggcgg |
| | | cagcggcggtggcggttccggcggtggtggcagcggtggtggtggtagcgatatcgaactgacccagcctccgagcgttagcgttgcaccgggt |
| | | cagaccgcacgtattagctgtagcggtgatagtctgcgtaataaagtttattggtatcagcagaaaccgggtcaggctccggttctggttatttat |
| | | aaaaataatcgtccgagcggtattccggaacgttttagcggtagcaatagcggtaataccgcaaccctgaccattagcggcacccaggcagaa |
| | | gatgaagccgattattattgtcagagctatgatggtcagaaaagcctggtttttggtggtggcaccaagcttaccgttctggcggcgagcgacgct |
| | | cacaagagcgaagtggcacataggttcaaagatctgggcgaagagaactttaaggccctcgtcctgatcgctttcgcacagtacctccagcagt |
| | | ctccctttgaagatcacgtgaaactggtcaatgaggtgaccgaatttgccaagacatgcgtggctgatgagagtgcagaaaactgtgacaaatc |
| | | actgcatactctctttggagataagctgtgcaccgtcgccacactcagagagacttatggggaaatggctgactgttgcgcaaaacaggagcct |
| | | gaacggaatgagtgtttcctccagcacaaggatgacaacccaaatctgccccgcctcgtgcgacctgaggtcgatgtgatgtgcaccgcctttca |
| | | tgacaacgaagagacattcctgaagaaatacctgtatgaaattgctcgtaggcacccatacttttatgcccccgagctcctgttctttgcaaagag |
| | | atacaaagctgccttcactgaatgttgccaggcagctgataaggccgcatgtctcctgcctaaactggacgagctccgggatgaaggtaaggctt |
| | | ccagcgccaaacagcgcctgaagtgcgcttctctccagaagtttggcgagcgagcattcaaagcctgggctgtggcccgtctcagtcagaggttt |
| | | ccaaaggcagaatttgctgaggtctcaaaactggtgaccgacctcacaaaggtccatactgagtgttgccacggagatctgctggaatgtgccg |
| | | acgatagagcagacctcgctaaatatatctgcgagaatcaggattccattagctctaagctgaaagaatgttgcgagaagcccctcctggaaaa |
| | | gagtcattgtatcgccgaggtggaaaacgacgagatgccagcagatctgccatcactcgctgccgactttgtggaatccaaagatgtctgcaag |
| | | aattacgcagaggctaaagacgtgttcctggggatgtttctgtatgagtacgcccggcgtcaccccgattatagcgtcgtgctcctgctccgactg |
| | | gcaaagacctacgaaacaactctggagaaatgttgcgctgccgcagaccctcatgaatgttatgctaaggtgttcgatgagtttaagccactcgt |
| | | cgaagagccccagaacctgattaaacagaattgcgaactgttcgagcagctcggtgaatacaagtttcagaacgccctgctcgtgcgttatacc |
| | | aaaaaggtccctcaggtgtctacaccaactctggtggaggtcagtaggaatctgggcaaagtgggatcaaagtgttgcaaacaccccgaggca |
| | | aagagaatgccttgtgctgaagattacctctccgtcgtgctgaaccagctctgcgtgctgcatgaaaagaccccagtcagcgatcgggtgacaa |
| | | aatgttgcaccgaatctctggtcaatcgccgaccctgtttcagtgccctcgaagtggacgaaacttatgtgcctaaggagtttcaggctgaaacat |
| | | tcacctttcacgccgatatctgcactctgtccgagaaagaaaggcagattaagaaacagacagcactggtcgagctcgtgaagcataaaccaa |
| | | aggctaccaaggagcagctgaaagccgtcatggacgatttcgcagcttttgtggaaaagtgttgcaaagccgacgataaggagacttgtttcgc |
| | | agaagaggggaaaaagctcgtggctgccagccaggcagctctgggtctggcggccgcagagaacctgtattttcagggtagccaccatcatca |
| | | ccatcac |
| 810T | | |
| SEQ ID NO: 291 | 810T | DIVLTQSPATLSLSPGERATLSCRASQFIGSRYLAWYQQKPGQAPRLLIYGASNRATGVPARFSGSGSGTDFTLTISSL |
| | | EPEDFATYYCQQYYDYPQTFGQGTKVEIKGGGGSGGGGSGGGGSGGGGSQVQLKESGPALVKPTQTLTLTCTFS |
| | | GFSLSNRGGGVGWIRQPPGKALEWLAWIDWDDDKSYSTSLKTRLTISKDTSKNQVVLTMTNMDPVDTATYYCAR |
| | | FHLPLVFDSWGQGTLVTVSSAASDAHKSEVAHRFKDLGEENFKALVLIAFAQYLQQSPFEDHVKLVNEVTEFAKTC |
| | | VADESAENCDKSLHTLFGDKLCTVATLRETYGEMADCCAKQEPERNECFLQHKDDNPNLPRLVRPEVDVMCTAF |
| | | HDNEETFLKKYLYEIARRHPYFYAPELLFFAKRYKAAFTECCQAADKAACLLPKLDELRDEGKASSAKQRLKCASLQK |
| | | FGERAFKAWAVARLSQRFPKAEFAEVSKLVTDLTKVHTECCHGDLLECADDRADLAKYICENQDSISSKLKECCEKP |
| | | LLEKSHCIAEVENDEMPADLPSLAADFVESKDVCKNYAEAKDVFLGMFLYEYARRHPDYSVVLLLRLAKTYETTLEKC |
| | | CAAADPHECYAKVFDEFKPLVEEPQNLIKQNCELFEQLGEYKFQNALLVRYTKKVPQVSTPTLVEVSRNLGKVGSKC |
| | | CKHPEAKRMPCAEDYLSVVLNQLCVLHEKTPVSDRVTKCCTESLVNRRPCFSALEVDETYVPKEFQAETFTFHADIC |
| | | TLSEKERQIKKQTALVELVKHKPKATKEQLKAVMDDFAAFVEKCCKADDKETCFAEEGKKLVAASQAALGLAAAEN |
| | | LYFQGSHHHHHH |
| SEQ ID NO: 292 | 810T DNA | gatatcgtgctgacacagagccctgccaccctgtctctgagccctggcgagagagccaccctgagctgccgggccagccagttcatcggctccc |
| | | gctacctggcctggtatcagcagaagcccggacaggctcccagactgctgatctacggcgccagcaacagagctaccggcgtgcccgccagatt |
| | | ttctggcagcggcagcggcaccgacttcaccctgaccatcagcagcctggaacccgaggacttcgccacctactactgccagcagtactacgac |
| | | tacccccagaccttcggccagggcaccaaggtggagatcaagggcggaggcggaagcgggggtggcggaagtggaggcggaggaagcgga |
| | | gggggcggaagccaggtgcaattgaaagagtccggccctgccctggtgaagcctacccagaccctgaccctgacatgcaccttcagcggcttca |
| | | gcctgagcaacagaggcggcggagtgggctggatcagacagcctcccggcaaggccctggaatggctggcctggatcgactgggacgacgac |
| | | aagagctacagcaccagcctgaaaacccggctgaccatctccaaggacaccagcaagaaccaggtggtgctcaccatgaccaacatggaccc |
| | | cgtggacaccgccacctattattgcgcccggtttcatctgcccctggtgttcgatagctggggccagggaaccctggtgacagtgtccagcgcgg |
| | | cgagcgacgctcacaagagcgaagtggcacataggttcaaagatctgggcgaagagaactttaaggccctcgtcctgatcgctttcgcacagta |
| | | cctccagcagtctccctttgaagatcacgtgaaactggtcaatgaggtgaccgaatttgccaagacatgcgtggctgatgagagtgcagaaaac |
| | | tgtgacaaatcactgcatactctctttggagataagctgtgcaccgtcgccacactcagagagacttatggggaaatggctgactgttgcgcaaa |
| | | acaggagcctgaacggaatgagtgtttcctccagcacaaggatgacaacccaaatctgccccgcctcgtgcgacctgaggtcgatgtgatgtgc |
| | | accgcctttcatgacaacgaagagacattcctgaagaaatacctgtatgaaattgctcgtaggcacccatacttttatgcccccgagctcctgttc |
| | | tttgcaaagagatacaaagctgccttcactgaatgttgccaggcagctgataaggccgcatgtctcctgcctaaactggacgagctccgggatga |
| | | aggtaaggcttccagcgccaaacagcgcctgaagtgcgcttctctccagaagtttggcgagcgagcattcaaagcctgggctgtggcccgtctc |
| | | agtcagaggtttccaaaggcagaatttgctgaggtctcaaaactggtgaccgacctcacaaaggtccatactgagtgttgccacggagatctgct |
| | | ggaatgtgccgacgatagagcagacctcgctaaatatatctgcgagaatcaggattccattagctctaagctgaaagaatgttgcgagaagccc |
| | | ctcctggaaaagagtcattgtatcgccgaggtggaaaacgacgagatgccagcagatctgccatcactcgctgccgactttgtggaatccaaag |
| | | atgtctgcaagaattacgcagaggctaaagacgtgttcctggggatgtttctgtatgagtacgcccggcgtcaccccgattatagcgtcgtgctcc |
| | | tgctccgactggcaaagacctacgaaacaactctggagaaatgttgcgctgccgcagaccctcatgaatgttatgctaaggtgttcgatgagttt |
| | | aagccactcgtcgaagagccccagaacctgattaaacagaattgcgaactgttcgagcagctcggtgaatacaagtttcagaacgccctgctcg |
| | | tgcgttataccaaaaaggtccctcaggtgtctacaccaactctggtggaggtcagtaggaatctgggcaaagtgggatcaaagtgttgcaaaca |
| | | ccccgaggcaaagagaatgccttgtgctgaagattacctctccgtcgtgctgaaccagctctgcgtgctgcatgaaaagaccccagtcagcgat |
| | | cgggtgacaaaatgttgcaccgaatctctggtcaatcgccgaccctgtttcagtgccctcgaagtggacgaaacttatgtgcctaaggagtttca |
| | | ggctgaaacattcacctttcacgccgatatctgcactctgtccgagaaagaaaggcagattaagaaacagacagcactggtcgagctcgtgaa |
| | | gcataaaccaaaggctaccaaggagcagctgaaagccgtcatggacgatttcgcagcttttgtggaaaagtgttgcaaagccgacgataagga |
| | | gacttgtttcgcagaagaggggaaaaagctcgtggctgccagccaggcagctctgggtctggcggccgcagagaacctgtattttcagggtagc |
| | | caccatcatcaccatcac |
| 801TF | | |
| SEQ ID NO: 293 | 801TF | QVQLVESGGGLVQPGGSLRLSCAASGFTFSDYVMNWVRQAPGKGLEWVAGISWSGVNTHYADSVKGRFTISRD |
| | | NSKNTLYLQMNSLRAEDTAVYYCARLGATANNIRYKFMDVWGQGTLVTVSSGGGGSGGGGSGGGGSGGGGSS |
| | | YELTQPPSVSVAPGQTARISCSGDSLRNKVYWYQQKPGQAPVLVIYKNNRPSGIPERFSGSNSGNTATLTISGTQAE |
| | | DEADYYCQSYDGQKSLVFGGGTKLTVLDAHKSEVAHRFKDLGEENFKALVLIAFAQYLQQSPFEDHVKLVNEVTEF |
| | | AKTCVADESAENCDKSLHTLFGDKLCTVATLRETYGEMADCCAKQEPERNECFLQHKDDNPNLPRLVRPEVDVM |
| | | CTAFHDNEETFLKKYLYEIARRHPYFYAPELLFFAKRYKAAFTECCQAADKAACLLPKLDELRDEGKASSAKQRLKCA |
| | | SLQKFGERAFKAWAVARLSQRFPKAEFAEVSKLVTDLTKVHTECCHGDLLECADDRADLAKYICENQDSISSKLKEC |
| | | CEKPLLEKSHCIAEVENDEMPADLPSLAADFVESKDVCKNYAEAKDVFLGMFLYEYARRHPDYSVVLLLRLAKTYET |
| | | TLEKCCAAADPHECYAKVFDEFKPLVEEPQNLIKQNCELFEQLGEYKFQNALLVRYTKKVPQVSTPTLVEVSRNLGK |
| | | VGSKCCKHPEAKRMPCAEDYLSVVLNQLCVLHEKTPVSDRVTKCCTESLVNRRPCFSALEVDETYVPKEFQAETFTF |
| | | HADICTLSEKERQIKKQTALVELVKHKPKATKEQLKAVMDDFAAFVEKCCKADDKETCFAEEGKKLVAASQAALGL |
| | | DIVLTQSPATLSLSPGERATLSCRASQFIGSRYLAWYQQKPGQAPRLLIYGASNRATGVPARFSGSGSGTDFTLTISSL |
| | | EPEDFATYYCQQYYDYPQTFGQGTKVEIKGGGGSGGGGSGGGGSGGGGSQVQLKESGPALVKPTQTLTLTCTFS |
| | | GFSLSNRGGGVGWIRQPPGKALEWLAWIDWDDDKSYSTSLKTRLTISKDTSKNQVVLTMTNMDPVDTATYYCAR |
| | | FHLPLVFDSWGQGTLVTVSSAAA |
| SEQ ID NO: 294 | 801TF DNA | caggttcaattggttgaaagcggtggtggtctggttcagcctggtggtagcctgcgtctgagctgtgcagcaagcggttttacctttagcgattatg |
| | | tgatgaattgggttcgtcaggcaccgggtaaaggtctggaatgggttgccggtattagctggtcaggtgttaatacccattatgcagatagcgtg |
| | | aaaggtcgttttaccattagccgtgataatagcaaaaataccctgtatctgcagatgaatagcctgcgtgcagaagataccgcagtttattattgt |
| | | gcacgtctgggtgcaaccgcaaataatattcgctataaatttatggatgtgtggggtcagggtacactagttaccgttagcagtggtggtggcgg |
| | | cagcggcggtggcggttccggcggtggtggcagcggtggtggtggtagctcttacgaactgacccagcctccgagcgttagcgttgcaccgggt |
| | | cagaccgcacgtattagctgtagcggtgatagtctgcgtaataaagtttattggtatcagcagaaaccgggtcaggctccggttctggttatttat |
| | | aaaaataatcgtccgagcggtattccggaacgttttagcggtagcaatagcggtaataccgcaaccctgaccattagcggcacccaggcagaa |
| | | gatgaagccgattattattgtcagagctatgatggtcagaaaagcctggtttttggtggtggcaccaagcttaccgttctggacgctcacaagag |
| | | cgaagtggcacataggttcaaagatctgggcgaagagaactttaaggccctcgtcctgatcgctttcgcacagtacctccagcagtctccctttg |
| | | aagatcacgtgaaactggtcaatgaggtgaccgaatttgccaagacatgcgtggctgatgagagtgcagaaaactgtgacaaatcactgcata |
| | | ctctctttggagataagctgtgcaccgtcgccacactcagagagacttatggggaaatggctgactgttgcgcaaaacaggagcctgaacggaa |
| | | tgagtgtttcctccagcacaaggatgacaacccaaatctgccccgcctcgtgcgacctgaggtcgatgtgatgtgcaccgcctttcatgacaacg |
| | | aagagacattcctgaagaaatacctgtatgaaattgctcgtaggcacccatacttttatgcccccgagctcctgttctttgcaaagagatacaaa |
| | | gctgccttcactgaatgttgccaggcagctgataaggccgcatgtctcctgcctaaactggacgagctccgggatgaaggtaaggcttccagcgc |
| | | caaacagcgcctgaagtgcgcttctctccagaagtttggcgagcgagcattcaaagcctgggctgtggcccgtctcagtcagaggtttccaaagg |
| | | cagaatttgctgaggtctcaaaactggtgaccgacctcacaaaggtccatactgagtgttgccacggagatctgctggaatgtgccgacgatag |
| | | agcagacctcgctaaatatatctgcgagaatcaggattccattagctctaagctgaaagaatgttgcgagaagcccctcctggaaaagagtcat |
| | | tgtatcgccgaggtggaaaacgacgagatgccagcagatctgccatcactcgctgccgactttgtggaatccaaagatgtctgcaagaattacg |
| | | cagaggctaaagacgtgttcctggggatgtttctgtatgagtacgcccggcgtcaccccgattatagcgtcgtgctcctgctccgactggcaaag |
| | | acctacgaaacaactctggagaaatgttgcgctgccgcagaccctcatgaatgttatgctaaggtgttcgatgagtttaagccactcgtcgaaga |
| | | gccccagaacctgattaaacagaattgcgaactgttcgagcagctcggtgaatacaagtttcagaacgccctgctcgtgcgttataccaaaaag |
| | | gtccctcaggtgtctacaccaactctggtggaggtcagtaggaatctgggcaaagtgggatcaaagtgttgcaaacaccccgaggcaaagaga |
| | | atgccttgtgctgaagattacctctccgtcgtgctgaaccagctctgcgtgctgcatgaaaagaccccagtcagcgatcgggtgacaaaatgttg |
| | | caccgaatctctggtcaatcgccgaccctgtttcagtgccctcgaagtggacgaaacttatgtgcctaaggagtttcaggctgaaacattcacctt |
| | | tcacgccgatatctgcactctgtccgagaaagaaaggcagattaagaaacagacagcactggtcgagctcgtgaagcataaaccaaaggctac |
| | | caaggagcagctgaaagccgtcatggacgatttcgcagcttttgtggaaaagtgttgcaaagccgacgataaggagacttgtttcgcagaaga |
| | | ggggaaaaagctcgtggctgccagccaggcagctctgggtctggatatcgtgctgacacagagccctgccaccctgtctctgagccctggcgag |
| | | agagccaccctgagctgccgggccagccagttcatcggctcccgctacctggcctggtatcagcagaagcccggacaggctcccagactgctga |
| | | tctacggcgccagcaacagagctaccggcgtgcccgccagattttctggcagcggcagcggcaccgacttcaccctgaccatcagcagcctgga |
| | | acccgaggacttcgccacctactactgccagcagtactacgactacccccagaccttcggccagggcaccaaggtggagatcaagggcggagg |
| | | cggaagcgggggtggcggaagtggaggcggaggaagcggagggggcggaagccaggtgcaattgaaagagtccggccctgccctggtgaa |
| | | gcctacccagaccctgaccctgacatgcaccttcagcggcttcagcctgagcaacagaggcggcggagtgggctggatcagacagcctcccgg |
| | | caaggccctggaatggctggcctggatcgactgggacgacgacaagagctacagcaccagcctgaaaacccggctgaccatctccaaggaca |
| | | ccagcaagaaccaggtggtgctcaccatgaccaacatggaccccgtggacaccgccacctattattgcgcccggtttcatctgcccctggtgttc |
| | | gatagctggggccagggaaccctggtgacagtgtccagcgcggccgca |
| 802TF | | |
| SEQ ID NO: 295 | 802TF | DIVLTQSPATLSLSPGERATLSCRASQFIGSRYLAWYQQKPGQAPRLLIYGASNRATGVPARFSGSGSGTDFTLTISSL |
| | | EPEDFATYYCQQYYDYPQTFGQGTKVEIKGGGGSGGGGSGGGGSGGGGSQVQLKESGPALVKPTQTLTLTCTFS |
| | | GFSLSNRGGGVGWIRQPPGKALEWLAWIDWDDDKSYSTSLKTRLTISKDTSKNQVVLTMTNMDPVDTATYYCAR |
| | | FHLPLVFDSWGQGTLVTVSSDAHKSEVAHRFKDLGEENFKALVLIAFAQYLQQSPFEDHVKLVNEVTEFAKTCVAD |
| | | ESAENCDKSLHTLFGDKLCTVATLRETYGEMADCCAKQEPERNECFLQHKDDNPNLPRLVRPEVDVMCTAFHDN |
| | | EETFLKKYLYEIARRHPYFYAPELLFFAKRYKAAFTECCQAADKAACLLPKLDELRDEGKASSAKQRLKCASLQKFGER |
| | | AFKAWAVARLSQRFPKAEFAEVSKLVTDLTKVHTECCHGDLLECADDRADLAKYICENQDSISSKLKECCEKPLLEKS |
| | | HCIAEVENDEMPADLPSLAADFVESKDVCKNYAEAKDVFLGMFLYEYARRHPDYSVVLLLRLAKTYETTLEKCCAAA |
| | | DPHECYAKVFDEFKPLVEEPQNLIKQNCELFEQLGEYKFQNALLVRYTKKVPQVSTPTLVEVSRNLGKVGSKCCKHP |
| | | EAKRMPCAEDYLSVVLNQLCVLHEKTPVSDRVTKCCTESLVNRRPCFSALEVDETYVPKEFQAETFTFHADICTLSEK |
| | | ERQIKKQTALVELVKHKPKATKEQLKAVMDDFAAFVEKCCKADDKETCFAEEGKKLVAASQAALGLQVQLVESGG |
| | | GLVQPGGSLRLSCAASGFTFSDYVMNWVRQAPGKGLEWVAGISWSGVNTHYADSVKGRFTISRDNSKNTLYLQ |
| | | MNSLRAEDTAVYYCARLGATANNIRYKFMDVWGQGTLVTVSSGGGGSGGGGSGGGGSGGGGSSYELTQPPSVS |
| | | VAPGQTARISCSGDSLRNKVYWYQQKPGQAPVLVIYKNNRPSGIPERFSGSNSGNTATLTISGTQAEDEADYYCQS |
| | | YDGQKSLVFGGGTKLTVLAAA |
| SEQ ID NO: 296 | 802TF DNA | gatatcgtgctgacacagagccctgccaccctgtctctgagccctggcgagagagccaccctgagctgccgggccagccagttcatcggctccc |
| | | gctacctggcctggtatcagcagaagcccggacaggctcccagactgctgatctacggcgccagcaacagagctaccggcgtgcccgccagatt |
| | | ttctggcagcggcagcggcaccgacttcaccctgaccatcagcagcctggaacccgaggacttcgccacctactactgccagcagtactacgac |
| | | tacccccagaccttcggccagggcaccaaggtggagatcaagggcggaggcggaagcgggggtggcggaagtggaggcggaggaagcgga |
| | | gggggcggaagccaggtgcaattgaaagagtccggccctgccctggtgaagcctacccagaccctgaccctgacatgcaccttcagcggcttca |
| | | gcctgagcaacagaggcggcggagtgggctggatcagacagcctcccggcaaggccctggaatggctggcctggatcgactgggacgacgac |
| | | aagagctacagcaccagcctgaaaacccggctgaccatctccaaggacaccagcaagaaccaggtggtgctcaccatgaccaacatggaccc |
| | | cgtggacaccgccacctattattgcgcccggtttcatctgcccctggtgttcgatagctggggccagggaaccctggtgacagtgtccagcgacg |
| | | ctcacaagagcgaagtggcacataggttcaaagatctgggcgaagagaactttaaggccctcgtcctgatcgctttcgcacagtacctccagca |
| | | gtctccctttgaagatcacgtgaaactggtcaatgaggtgaccgaatttgccaagacatgcgtggctgatgagagtgcagaaaactgtgacaaa |
| | | tcactgcatactctctttggagataagctgtgcaccgtcgccacactcagagagacttatggggaaatggctgactgttgcgcaaaacaggagcc |
| | | tgaacggaatgagtgtttcctccagcacaaggatgacaacccaaatctgccccgcctcgtgcgacctgaggtcgatgtgatgtgcaccgcctttc |
| | | atgacaacgaagagacattcctgaagaaatacctgtatgaaattgctcgtaggcacccatacttttatgcccccgagctcctgttctttgcaaaga |
| | | gatacaaagctgccttcactgaatgttgccaggcagctgataaggccgcatgtctcctgcctaaactggacgagctccgggatgaaggtaaggc |
| | | ttccagcgccaaacagcgcctgaagtgcgcttctctccagaagtttggcgagcgagcattcaaagcctgggctgtggcccgtctcagtcagaggt |
| | | ttccaaaggcagaatttgctgaggtctcaaaactggtgaccgacctcacaaaggtccatactgagtgttgccacggagatctgctggaatgtgcc |
| | | gacgatagagcagacctcgctaaatatatctgcgagaatcaggattccattagctctaagctgaaagaatgttgcgagaagcccctcctggaaa |
| | | agagtcattgtatcgccgaggtggaaaacgacgagatgccagcagatctgccatcactcgctgccgactttgtggaatccaaagatgtctgcaa |
| | | gaattacgcagaggctaaagacgtgttcctggggatgtttctgtatgagtacgcccggcgtcaccccgattatagcgtcgtgctcctgctccgact |
| | | ggcaaagacctacgaaacaactctggagaaatgttgcgctgccgcagaccctcatgaatgttatgctaaggtgttcgatgagtttaagccactcg |
| | | tcgaagagccccagaacctgattaaacagaattgcgaactgttcgagcagctcggtgaatacaagtttcagaacgccctgctcgtgcgttatacc |
| | | aaaaaggtccctcaggtgtctacaccaactctggtggaggtcagtaggaatctgggcaaagtgggatcaaagtgttgcaaacaccccgaggca |
| | | aagagaatgccttgtgctgaagattacctctccgtcgtgctgaaccagctctgcgtgctgcatgaaaagaccccagtcagcgatcgggtgacaa |
| | | aatgttgcaccgaatctctggtcaatcgccgaccctgtttcagtgccctcgaagtggacgaaacttatgtgcctaaggagtttcaggctgaaacat |
| | | tcacctttcacgccgatatctgcactctgtccgagaaagaaaggcagattaagaaacagacagcactggtcgagctcgtgaagcataaaccaa |
| | | aggctaccaaggagcagctgaaagccgtcatggacgatttcgcagcttttgtggaaaagtgttgcaaagccgacgataaggagacttgtttcgc |
| | | agaagaggggaaaaagctcgtggctgccagccaggcagctctgggtctgcaggttcaattggttgaaagcggtggtggtctggttcagcctggt |
| | | ggtagcctgcgtctgagctgtgcagcaagcggttttacctttagcgattatgtgatgaattgggttcgtcaggcaccgggtaaaggtctggaatgg |
| | | gttgccggtattagctggtcaggtgttaatacccattatgcagatagcgtgaaaggtcgttttaccattagccgtgataatagcaaaaataccctg |
| | | tatctgcagatgaatagcctgcgtgcagaagataccgcagtttattattgtgcacgtctgggtgcaaccgcaaataatattcgctataaatttatg |
| | | gatgtgtggggtcagggtacactagttaccgttagcagtggtggtggcggcagcggcggtggcggttccggcggtggtggcagcggtggtggtg |
| | | gtagctcttacgaactgacccagcctccgagcgttagcgttgcaccgggtcagaccgcacgtattagctgtagcggtgatagtctgcgtaataaa |
| | | gtttattggtatcagcagaaaccgggtcaggctccggttctggttatttataaaaataatcgtccgagcggtattccggaacgttttagcggtagc |
| | | aatagcggtaataccgcaaccctgaccattagcggcacccaggcagaagatgaagccgattattattgtcagagctatgatggtcagaaaagc |
| | | ctggtttttggtggtggcaccaagcttaccgttctggcggccgca |
| 911T | | |
| SEQ ID NO: 297 | 911T | QVQLVESGGGLVQPGGSLRLSCAASGFTFSDYVMNWVRQAPGKGLEWVAGISWSGVNTHYADSVKGRFTISRD |
| | | NSKNTLYLQMNSLRAEDTAVYYCARLGATANNIRYKFMDVWGQGTLVTVSSGGGGSGGGGSGGGGSGGGGSD |
| | | IELTQPPSVSVAPGQTARISCSGDSLRNKVYWYQQKPGQAPVLVIYKNNRPSGIPERFSGSNSGNTATLTISGTQAE |
| | | DEADYYCQSYDGQKSLVFGGGTKLTVLDKTHTCPPCPAPEAAGGPSVFLFPPKPKDTLMISRTPEVTCVVVDVSHE |
| | | DPEVKFNWYVDGVEVHNAKTKPREEQYNSTYRVVSVLTVLHQDWLNGKEYKCKVSNKALPAPIEKTISKAKGQPR |
| | | EPQVYTLPPSREEMTKNQVSLTCLVKGFYPSDIAVEWESNGQPENNYKTTPPVLDSDGSFFLYSKLTVDKSRWQQ |
| | | GNVFSCSVMHEALHNHYTQKSLSLSPGKGGGGSGGGGSGGGGSDIVLTQSPATLSLSPGERATLSCRASQFIGSRY |
| | | LAWYQQKPGQAPRLLIYGASNRATGVPARFSGSGSGTDFTLTISSLEPEDFATYYCQQYYDYPQTFGQGTKVEIKG |
| | | GGGSGGGGSGGGGSGGGGSQVQLKESGPALVKPTQTLTLTCTFSGFSLSNRGGGVGWIRQPPGKALEWLAWID |
| | | WDDDKSYSTSLKTRLTISKDTSKNQVVLTMTNMDPVDTATYYCARFHLPLVFDSWGQGTLVTVSS |
| SEQ ID NO: 298 | 911T DNA | caggttcaattggttgaaagcggtggtggtctggttcagcctggtggtagcctgcgtctgagctgtgcagcaagcggttttacctttagcgattatg |
| | | tgatgaattgggttcgtcaggcaccgggtaaaggtctggaatgggttgccggtattagctggtcaggtgttaatacccattatgcagatagcgtg |
| | | aaaggtcgttttaccattagccgtgataatagcaaaaataccctgtatctgcagatgaatagcctgcgtgcagaagataccgcagtttattattgt |
| | | gcacgtctgggtgcaaccgcaaataatattcgctataaatttatggatgtgtggggtcagggtacactagttaccgttagcagtggtggtggcgg |
| | | cagcggcggtggcggttccggcggtggtggcagcggtggtggtggtagcgatatcgaactgacccagcctccgagcgttagcgttgcaccgggt |
| | | cagaccgcacgtattagctgtagcggtgatagtctgcgtaataaagtttattggtatcagcagaaaccgggtcaggctccggttctggttatttat |
| | | aaaaataatcgtccgagcggtattccggaacgttttagcggtagcaatagcggtaataccgcaaccctgaccattagcggcacccaggcagaa |
| | | gatgaagccgattattattgtcagagctatgatggtcagaaaagcctggtttttggtggtggcaccaagcttaccgttctggacaagacccacac |
| | | ctgccccccctgcccagccccagaggcagcgggcggaccctccgtgttcctgttcccccccaagcccaaggacaccctgatgatcagcaggacc |
| | | cccgaggtgacctgcgtggtggtggacgtgagccacgaggacccagaggtgaagttcaactggtacgtggacggcgtggaggtgcacaacgcc |
| | | aagaccaagcccagagaggagcagtacaacagcacctacagggtggtgtccgtgctgaccgtgctgcaccaggactggctgaacggcaagga |
| | | atacaagtgcaaggtctccaacaaggccctgccagcccccatcgaaaagaccatcagcaaggccaagggccagccacgggagccccaggtgt |
| | | acaccctgcccccctcccgggaggagatgaccaagaaccaggtgtccctgacctgtctggtgaagggcttctaccccagcgacatcgccgtgga |
| | | gtgggagagcaacggccagcccgagaacaactacaagaccacccccccagtgctggacagcgacggcagcttcttcctgtacagcaagctga |
| | | ccgtggacaagtccaggtggcagcagggcaacgtgttcagctgcagcgtgatgcacgaagcgctgcacaaccactacacccagaagagcctg |
| | | agcctgtcccccggcaagggaggtggcgggagtggtggagggggctcaggcgggggtggatctgatatcgtgctgacacagagccctgccacc |
| | | ctgtctctgagccctggcgagagagccaccctgagctgccgggccagccagttcatcggctcccgctacctggcctggtatcagcagaagcccg |
| | | gacaggctcccagactgctgatctacggcgccagcaacagagctaccggcgtgcccgccagattttctggcagcggcagcggcaccgacttcac |
| | | cctgaccatcagcagcctggaacccgaggacttcgccacctactactgccagcagtactacgactacccccagaccttcggccagggcaccaag |
| | | gtggagatcaagggcggaggcggatccgggggtggcggaagtggaggcggaggaagcggagggggcggaagccaggtgcaattgaaagag |
| | | tccggccctgccctggtgaagcctacccagaccctgaccctgacatgcaccttcagcggcttcagcctgagcaacagaggcggcggagtgggct |
| | | ggatcagacagcctcccggcaaggccctggaatggctggcctggatcgactgggacgacgacaagagctacagcaccagcctgaaaacccgg |
| | | ctgaccatctccaaggacaccagcaagaaccaggtggtgctcaccatgaccaacatggaccccgtggacaccgccacctattattgcgcccggt |
| | | ttcatctgcccctggtgttcgatagctggggccagggaaccctggtgacagtgtccagc |
| 912T | | |
| SEQ ID NO: 299 | 912T | DIVLTQSPATLSLSPGERATLSCRASQFIGSRYLAWYQQKPGQAPRLLIYGASNRATGVPARFSGSGSGTDFTLTISSL |
| | | EPEDFATYYCQQYYDYPQTFGQGTKVEIKGGGGSGGGGSGGGGSGGGGSQVQLKESGPALVKPTQTLTLTCTFS |
| | | GFSLSNRGGGVGWIRQPPGKALEWLAWIDWDDDKSYSTSLKTRLTISKDTSKNQVVLTMTNMDPVDTATYYCAR |
| | | FHLPLVFDSWGQGTLVTVSSDKTHTCPPCPAPEAAGGPSVFLFPPKPKDTLMISRTPEVTCVVVDVSHEDPEVKFN |
| | | WYVDGVEVHNAKTKPREEQYNSTYRVVSVLTVLHQDWLNGKEYKCKVSNKALPAPIEKTISKAKGQPREPQVYTL |
| | | PPSREEMTKNQVSLTCLVKGFYPSDIAVEWESNGQPENNYKTTPPVLDSDGSFFLYSKLTVDKSRWQQGNVFSCS |
| | | VMHEALHNHYTQKSLSLSPGKGGGGSGGGGSGGGGSQVQLVESGGGLVQPGGSLRLSCAASGFTFSDYVMNW |
| | | VRQAPGKGLEWVAGISWSGVNTHYADSVKGRFTISRDNSKNTLYLQMNSLRAEDTAVYYCARLGATANNIRYKF |
| | | MDVWGQGTLVTVSSGGGGSGGGGSGGGGSGGGGSDIELTQPPSVSVAPGQTARISCSGDSLRNKVYWYQQKP |
| | | GQAPVLVIYKNNRPSGIPERFSGSNSGNTATLTISGTQAEDEADYYCQSYDGQKSLVFGGGTKLTVL |
| SEQ ID NO: 300 | 912T DNA | gatatcgtgctgacacagagccctgccaccctgtctctgagccctggcgagagagccaccctgagctgccgggccagccagttcatcggctccc |
| | | gctacctggcctggtatcagcagaagcccggacaggctcccagactgctgatctacggcgccagcaacagagctaccggcgtgcccgccagatt |
| | | ttctggcagcggcagcggcaccgacttcaccctgaccatcagcagcctggaacccgaggacttcgccacctactactgccagcagtactacgac |
| | | tacccccagaccttcggccagggcaccaaggtggagatcaagggcggaggcggaagcgggggtggcggaagtggaggcggaggaagcgga |
| | | gggggcggaagccaggtgcaattgaaagagtccggccctgccctggtgaagcctacccagaccctgaccctgacatgcaccttcagcggcttca |
| | | gcctgagcaacagaggcggcggagtgggctggatcagacagcctcccggcaaggccctggaatggctggcctggatcgactgggacgacgac |
| | | aagagctacagcaccagcctgaaaacccggctgaccatctccaaggacaccagcaagaaccaggtggtgctcaccatgaccaacatggaccc |
| | | cgtggacaccgccacctattattgcgcccggtttcatctgcccctggtgttcgatagctggggccagggaaccctggtgacagtgtccagcgaca |
| | | agacccacacctgccccccctgcccagccccagaggcagcgggcggaccctccgtgttcctgttcccccccaagcccaaggacaccctgatgat |
| | | cagcaggacccccgaggtgacctgcgtggtggtggacgtgagccacgaggacccagaggtgaagttcaactggtacgtggacggcgtggagg |
| | | tgcacaacgccaagaccaagcccagagaggagcagtacaacagcacctacagggtggtgtccgtgctgaccgtgctgcaccaggactggctg |
| | | aacggcaaggaatacaagtgcaaggtctccaacaaggccctgccagcccccatcgaaaagaccatcagcaaggccaagggccagccacggg |
| | | agccccaggtgtacaccctgcccccctcccgggaggagatgaccaagaaccaggtgtccctgacctgtctggtgaagggcttctaccccagcga |
| | | catcgccgtggagtgggagagcaacggccagcccgagaacaactacaagaccacccccccagtgctggacagcgacggcagcttcttcctgta |
| | | cagcaagctgaccgtggacaagtccaggtggcagcagggcaacgtgttcagctgcagcgtgatgcacgaagcgctgcacaaccactacaccc |
| | | agaagagcctgagcctgtcccccggcaagggaggtggcgggagtggtggagggggctcaggcgggggtggatctcaggttcaattggttgaa |
| | | agcggtggtggtctggttcagcctggtggtagcctgcgtctgagctgtgcagcaagcggttttacctttagcgattatgtgatgaattgggttcgtc |
| | | aggcaccgggtaaaggtctggaatgggttgccggtattagctggtcaggtgttaatacccattatgcagatagcgtgaaaggtcgttttaccatt |
| | | agccgtgataatagcaaaaataccctgtatctgcagatgaatagcctgcgtgcagaagataccgcagtttattattgtgcacgtctgggtgcaac |
| | | cgcaaataatattcgctataaatttatggatgtgtggggtcagggtacactagttaccgttagcagtggtggtggtggtagcggtggtggcggat |
| | | ctggtggcggtggttcaggtggtggtggcagtgatatcgaactgacccagcctccgagcgttagcgttgcaccgggtcagaccgcacgtattagc |
| | | tgtagcggtgatagtctgcgtaataaagtttattggtatcagcagaaaccgggtcaggctccggttctggttatttataaaaataatcgtccgagc |
| | | ggtattccggaacgttttagcggtagcaatagcggtaataccgcaaccctgaccattagcggcacccaggcagaagatgaagccgattattatt |
| | | gtcagagctatgatggtcagaaaagcctggtttttggtggtggcaccaagcttaccgttctg |

[0212] LRP6 constructs provide advantages over traditional antibodies for example, expanding the repertoire of targets, having new binding specificities, increased potency, and no signal potentiation. A single LRP6 construct can bind to multiple Propeller regions on a single LRP6 target receptor on the same cell, and inhibit Wnt signaling. In one embodiment, the LRP6 construct binds to any combination of a β-propeller regions selected from the group consisting of propeller 1 (P 1), propeller 2 (P2), propeller 3 (P3), and propeller 4 (P4). In one embodiment, the LRP6 construct binds to propeller 1 and propeller 3 domains of LRP6. Thus, a single LRP6 construct has increased potency of action by binding to multiple β-propeller regions and inhibiting Wnt signaling mediated by each domain. For example, a single LRP6 construct inhibits both propeller 1 and propeller 3 mediated Wnt signaling by binding to both propeller 1 and propeller 3 domains, respectively, all while avoiding potentiation of a Wnt signal.

[0213] The LRP6 constructs can bind multiple binding sites of the LRP6 receptor concurrently. The LRP6 binding moieties of the LRP6 constructs may bind at least 1, 2, 3, 4, 5, 6, 7, 8 or more binding sites of the LRP6 receptor. The LRP6 constructs can comprise one or more LRP6 binding moieties that are specific for distinct epitopes on the same LRP6 receptor, e.g., β-propeller 1 domain or β-propeller 3 domain of LRP6 receptor. Alternatively, the LRP6 constructs can comprise one or more LRP6 binding moieties that are specific for epitopes on different target receptors, e.g., LRP6 and a receptor that is not LRP6 such as Erb, cmet, IGFR1, Smoothened, and Notch receptors.

[0214] In one embodiment, two or more identical LRP6 binding moieties (i.e., moieties having the same structure and binding affinities) are linked to the half-life extender, one or more (e.g., in tandem) each at the amino and carboxy termini of the half-life extender, e.g., the HSA affording improved avidity of the binding moieties for their target antigen (e.g. scFv(P1)-scFv(P1)-HSA; scFv(P3)-scFv(P3)-HSA; HSA-scFv(P1)-scFv(P3)). Alternatively, two or more different LRP6 binding moieties (e.g., a Fab, an scFv, with binding affinities for two or more same or different target molecules (e.g., scFv(P1)-HSA-Fab(P3); scFv(P3)-HSA-Fab(P1); Fab(P1)-HSA-scFv(P3); Fab(P3)-HSA-scFv(P1))), or Fab or scFv with binding affinities for two or more different epitopes on the same target molecule can be linked to the half-life extender (e.g., scFv(P3)-HSA-scFv(P1); scFv(P1)-HSA-scFv(P3), Fab(P1)-HSA-Fab(P3), Fab(P3)-HSA-Fab(P1), scFv(P1)-scFv(P3)-HSA, scFv(P3)-scFv(P1)-HSA) Fab(P1)-Fab(P3)-HSA, Fab(P3)-Fab(P1)-HSA) to allow multiple target antigens or epitopes to be bound by the LRP6 conjugate. In another embodiment, different species of LRP6 binding moieties can also be linked to an LRP6 conjugate to bestow, for example, two or more different binding specificities or agonistic/antagonistic biological properties on the LRP6

[0215] In one embodiment, the LRP6 construct comprises a scFv that binds to the Propeller 1 region of LRP6 receptor, a half-life extender molecule (e.g., HSA), and a scFv that binds to Propeller 3 region of the LRP6 receptor. The construct is designated “801” and has the construct sequence of scFv(P1)-HSA-scFv(P3).

[0216] In one embodiment, the LRP6 construct comprises a scFv that binds to the Propeller 3 region of LRP6 receptor, a half-life extender molecule (e.g., HSA), and a scFv that binds to Propeller 1 region of the LRP6 receptor. The construct is designated “802” and has the construct sequence of scFv(P3)-HSA-scFv(P1).

[0217] In another embodiment, the LRP6 construct comprises a Fab that binds to the Propeller 1 region of LRP6 receptor, a half-life extender molecule (e.g., HSA), and a Fab that binds to Propeller 3 region of the LRP6 receptor. The construct is designated Fab(P1)-HSA-Fab(P3).

[0218] In another embodiment, the LRP6 construct comprises a scFv that binds to the Propeller 1 region of LRP6 receptor, a half-life extender molecule (e.g., HSA), and a Fab that binds to Propeller 3 region of the LRP6 receptor. The construct is designated scFv(P1)-HSA-Fab(P3).

[0219] In another embodiment, the LRP6 construct comprises a Fab that binds to the Propeller 1 region of LRP6 receptor, a half-life extender molecule (e.g., PEG), and a Fab that binds to Propeller 3 region of the LRP6 receptor. The construct is designated Fab(P1)-PEG-Fab(P3)

[0220] In another embodiment, the LRP6 construct comprises a scFv that binds to the Propeller 1 region of LRP6 receptor, a half-life extender molecule (e.g., Fc), and a scFv that binds to Propeller 3 region of the LRP6 receptor. The construct is designated scFv (P1)-Fc-scFv (P3).

### LRP6 Construct Orientation

[0221] LRP6 constructs are generated in any orientation using at least one LRP6 binding moiety (e.g., a scFv, and Fab) as long as the resulting LRP6 construct retain functional activity (e.g., inhibiting Wnt signaling) and prolonged half-life. It should be understood that any number of LRP6 binding moieties can be added to the C-terminus and/or N-terminus of the half-life extender as long as the resulting LRP6 constructs retain functional activity (e.g., inhibiting Wnt signaling). In an embodiment, one, two, three, or more LRP6 binding moieties are linked to the C-terminus of the half-life extender. In other embodiments one, two, three, or more LRP6 binding moieties are linked to the N-terminus of the half-life extender. In other embodiments, one, two, three, or more LRP6 binding moieties are linked to both the N-terminus and C-terminus of the half-life extender. For example, LRP6 constructs can comprise more than LRP6 binding moiety of the same type linked to the C-terminus and/or N-terminus of the half-life extender, e.g., scFv-half-life extender-scFv. Alternatively, the LRP6 construct can comprise more than one LRP6 binding moieties of a different type linked to the C-terminus and/or N-terminus of the half-life extender, e.g., scFv-half-life extender-Fab.

[0222] LRP6 constructs with any number of permutations of LRP6 binding moieties and half-life extenders can be generated. In one embodiment, the half-life extender is HSA. In another embodiment, the half-life extender is Fc. In another embodiment, the half-life extender is PEG. These LRP6 constructs can be tested for functionality using the methods and assays described within.

[0223] The LRP6 conjugates can be characterized by various functional assays. For example, they can be characterized by their ability to inhibit biological activity by inhibiting canonical Wnt signaling in a Wnt gene assay as described herein, their affinity to a LRP6 protein (e.g., human and/or cynomologus LRP6), the epitope binning, their resistance to proteolysis, and their ability to block the Wnt pathway. In addition, the LRP6 conjugates are characterized by ability to potentiate a Wnt signal in the presence of a Wnt ligand. Various methods can be used to measure LRP6-mediated Wnt signaling. For example, the Wnt signaling pathway can be monitored by (i) measurement of abundance and localization of β-catenin; and (ii) measurement of phosphorylation of LRP6 or other downstream Wnt signaling proteins (e.g. DVL), and iii) measurement of specific gene signatures or gene targets (e.g. c-myc, Cyclin-D, Axing).

### LRP6 Conjugate—Conjugates

[0224] The LRP6 conjugates can be coupled to a diagnostic or detectable agent to generate LRP6 conjugate-conjugates. Such LRP6 conjugates can be useful for monitoring or prognosing the onset, development, progression and/or severity of a disease or disorder as part of a clinical testing procedure, such as determining the efficacy of a particular therapy. Such diagnosis and detection can accomplished by coupling the LRP6 conjugates to detectable substances including, but not limited to, various enzymes, such as, but not limited to, horseradish peroxidase, alkaline phosphatase, beta-galactosidase, or acetylcholinesterase; prosthetic groups, such as, but not limited to, streptavidin/biotin and avidin/biotin; fluorescent materials, such as, but not limited to, umbelliferone, fluorescein, fluorescein isothiocynate, rhodamine, dichlorotriazinylamine fluorescein, dansyl chloride or phycoerythrin; luminescent materials, such as, but not limited to, luminol; bioluminescent materials, such as but not limited to, luciferase, luciferin, and aequorin; radioactive materials, such as, but not limited to, iodine (¹³¹I, ¹²⁵I, ¹²³I, and ¹²¹I) carbon (¹⁴C), sulfur (³⁵S), tritium (³H), indium (¹¹⁵In, ¹¹³In, ¹¹²In, and ¹¹¹In), technetium (⁹⁹Tc), thallium (²⁰¹Ti), gallium (⁶⁸Ga, ⁶⁷Ga), palladium (¹⁰³Pd), molybdenum (⁹⁹Mo), xenon (¹³³Xe), fluorine (¹⁸F), ¹⁵³Sm, ¹⁷⁷Lu, ¹⁵⁹Gd, ¹⁴⁹Pm, ¹⁴⁰La, ¹⁷⁵Yb, ¹⁶⁶Ho, ⁹⁰Y, 47Sc, ¹⁸⁶Re, ¹⁸⁸Re, ¹⁴²Pr, ¹⁰⁵Rh, ⁹⁷Ru, ⁶⁸Ge, ⁵⁷Co, ⁶⁵Zn, ⁸⁵Sr, ³²P, ¹⁵³Gd, ¹⁶⁹Yb, ⁵¹Cr, ⁵⁴Mn, ⁷⁵Se, ¹¹³Sn, and ¹¹⁷Tin; and positron emitting metals using various positron emission tomographies, and noradioactive paramagnetic metal ions.

[0225] The present invention further encompasses uses of LRP6 conjugates coupled to a therapeutic moiety such as a cytotoxin, e.g., a cytostatic or cytocidal agent, a therapeutic agent or a radioactive metal ion, e.g., alpha-emitters. A cytotoxin or cytotoxic agent includes any agent that is detrimental to cells.

[0226] LRP6 conjugates can be coupled to a radioactive isotope to generate cytotoxic radiopharmaceuticals, also referred to as radioimmunoconjugates. Examples of radioactive isotopes that can be conjugated to antibodies for use diagnostically or therapeutically include, but are not limited to, iodine¹³¹, indium¹¹¹, yttrium⁹⁰, and lutetium¹⁷⁷. Method for preparing radioimmunconjugates are established in the art. Examples of radioimmunoconjugates are commercially available, including Zevalin™ (DEC Pharmaceuticals) and Bexxar™ (Corixa Pharmaceuticals), and similar methods can be used to prepare radioimmunoconjugates. In certain embodiments, the macrocyclic chelator is 1,4,7,10-tetraazacyclododecane-N,N′,N″,N″′-tetraacetic acid (DOTA) which can be attached to the LRP6 conjugates via a linker molecule. Such linker molecules are commonly known in the art and described in Denardo et al., (1998) Clin Cancer Res. 4(10):2483-90; Peterson et al., (1999) Bioconjug. Chem. 10(4):553-7; and Zimmerman et al., (1999) Nucl. Med. Biol. 26(8):943-50, each incorporated by reference in their entireties.

### LRP6 Conjugate Manufacture

[0227] The LRP6 construct can be produced recombinantly. For example, a nucleotide sequence encoding the LRP6 binding moieties and the half-life extender molecule may be expressed (e.g., in a plasmid, viral vector, or transgenically) in a bacterial (e.g., E. coli), insect, yeast, or mammalian cell (e.g., a CHO cell), or a mammalian tissue, organ, or organism (e.g., a transgenic rodent, ungulate (e.g., a goat), or non-human primate). After expression of the LRP6 construct in the host cell, tissue, or organ, the skilled artisan may isolate and purify the LRP6 construct using standard protein purification methods (e.g., FPLC or affinity chromatography).

[0228] Alternatively, the LRP6 construct can be synthetically produced. For example, the LRP6 construct can be prepared by techniques generally established in the art of peptide synthesis, such as the solid-phase approach. Solid-phase synthesis involves the stepwise addition of amino acid residues to a growing peptide chain that is linked to an insoluble support or matrix, such as polystyrene. The C-terminus residue of the peptide is first anchored to a commercially available support with its amino group protected with an N-protecting agent such as a t-butyloxycarbonyl group (tBoc) or a fluorenylmethoxycarbonyl (FMOC) group. The amino-protecting group is removed with suitable deprotecting agents such as TFA in the case of tBOC or piperidine for FMOC and the next amino acid residue (in N-protected form) is added with a coupling agent such as dicyclocarbodiimide (DCC). Upon formation of a peptide bond, the reagents arc washed from the support. After addition of the final residue, the agent is cleaved from the support with a suitable reagent, such as trifluoroacetic acid (TFA) or hydrogen fluoride (HF). If desired, the LRP6 construct can be manufactured in one, two, three, or more segments, which can then be ligated to form the whole LRP6 construct.

### Prophylactic and Therapeutic Uses

[0229] The present invention provides methods of treating a disease or disorder associated with the LRP6 Wnt signaling pathway by administering to a subject in need thereof an effective amount of the LRP6 conjugates. In a specific embodiment, the present invention provides a method of treating or preventing cancers (e.g., breast cancer, lung cancer, multiple myeloma, ovarian cancer, liver cancer, bladder cancer, gastric cancer, prostate cancer, acute myeloid leukemia, chronic myeloid leukemia, osteosarcoma, squamous cell carcinoma, and melanoma by administering to a subject in need thereof an effective amount of the LRP6 conjugates. In some embodiments, the present invention provides methods of treating or preventing cancers associated with a Wnt signaling pathway by administering to a subject in need thereof an effective amount of the LRP6 conjugates.

[0230] In one embodiment, the present invention provides methods of treating cancers associated with a Wnt signaling pathway that include, but are not limited to breast cancer, lung cancer, multiple myeloma, ovarian cancer, bladder cancer, liver cancer gastric cancer, prostate cancer, acute myeloid leukemia, chronic myeloid leukemia, osteosarcoma, squamous cell carcinoma, and melanoma.

[0231] LRP6 conjugates can also be used to treat or prevent other disorders associated with aberrant or defective Wnt signaling, including but are not limited to osteoporosis, osteoarthritis, polycystic kidney disease, diabetes, schizophrenia, vascular disease, cardiac disease, non-oncogenic proliferative diseases, fibrosis, and neurodegenerative diseases such as Alzheimer's disease. The Wnt signaling pathway plays a critical role in tissue repair and regeneration. Agents that sensitize cells to Wnt signaling can be used to promote tissue regeneration for many conditions such as bone diseases, mucositis, acute and chronic kidney injury, and others.

[0232] Suitable agents for combination treatment with LRP6 conjugates include standard of care agents known in the art that are able to modulate the activities of canonical Wnt signaling pathway (e.g., PI3 kinase agents).

### Pharmaceutical Compositions

[0233] LRP6 conjugates may be administered prior to, concurrent with, or following radiotherapy or surgery. For example, a patient suffering from a proliferative disorder (e.g., breast cancer) can receive an LRP6 conjugate, alone or in combination with other therapeutic, cytotoxic, or cytotoxic agents as described herein concurrent with targeted radiotherapy or surgical intervention (e.g., lumpectomy or mastectomy) at the site of the cancerous tissue. Radiotherapies suitable for use in combination with LRP6 conjugates include brachy therapy and targeted intraoperative radiotherapy (TARGIT).

[0234] Pharmaceutical compositions provided herein contain a therapeutically or diagnostically effective amount of a LRP6 conjugate that includes one or more of a LRP6 binding moiety (e.g., antibodies or antibody fragments). The active ingredients, an LRP6 conjugate (prepared with one or more of a LRP6 binding moiety can be formulated for use in a variety of drug delivery systems. One or more physiologically acceptable excipients or carriers can also be included in the compositions for proper formulation. Suitable formulations for use in the present invention are found in Remington's Pharmaceutical Sciences, Mack Publishing Company, Philadelphia, Pa., 17th ed. (1985). For a brief review of methods for drug delivery, see, Langer Science 249:1527-1533 (1990).

[0235] The pharmaceutical compositions are intended for parenteral, intranasal, topical, oral, or local administration, such as by a transdermal means, for prophylactic and/or therapeutic treatment. Commonly, the pharmaceutical compositions are administered parenterally (e.g., by intravenous, intramuscular, or subcutaneous injection), or by oral ingestion, or by topical application. Thus, compositions for parenteral administration may include an LRP6 conjugate dissolved or suspended in an acceptable carrier, preferably an aqueous carrier, e.g., water, buffered water, saline, PBS, and the like. The compositions may contain pharmaceutically acceptable auxiliary substances as required to approximate physiological conditions, such as pH adjusting and buffering agents, tonicity adjusting agents, wetting agents, detergents and the like. The invention also provides compositions for oral delivery, which may contain inert ingredients such as binders or fillers for the formulation of a tablet, a capsule, and the like. Furthermore, this invention provides compositions for local administration, which may contain inert ingredients such as solvents or emulsifiers for the formulation of a cream, an ointment, and the like.

[0236] These compositions may be sterilized by conventional sterilization techniques, or may be sterile filtered. The resulting aqueous solutions may be packaged for use as is, or lyophilized, the lyophilized preparation being combined with a sterile aqueous carrier prior to administration. The pH of the preparations typically will be between 3 and 11, more preferably between 5 and 9 or between 6 and 8, and most preferably between 7 and 8, such as 7 to 7.5. The resulting compositions in solid form may be packaged in multiple single dose units, each containing a fixed amount of an LRP6 conjugate in a sealed package of tablets or capsules, for example. The composition in solid form can also be packaged in a container for a flexible quantity, such as in a squeezable tube designed for a topically applicable cream or ointment.

[0237] The compositions containing an effective amount of an LRP6 conjugate can be administered to a mammal (e.g., a human) for prophylactic and/or therapeutic treatments. In prophylactic applications, compositions containing an LRP6 conjugate are administered to a patient susceptible to or otherwise at risk of developing a disease or condition (e.g., a cancer). Such an amount is defined to be a “prophylactically effective dose.” In this use, the precise amounts again depend on the patient's state of health, but generally range from about 0.5 mg to about 400 mg of an LRP6 conjugate per dose (e.g., 10 mg, 50 mg, 100 mg, 200 mg, 300 mg, or 400 mg or more per dose) and from about 0.1 ng to about 300 mg of one or more immunomodulatory agents per dose (e.g., 10 ng, 30 ng, 50 ng, 0.1 mg, 10 mg, 50 mg, 100 mg, or 200 mg per dose). A dose of an LRP6 conjugate can be administered prophylactically to a patient one or more times per hour, day, week, month, or year (e.g., 2, 4, 5, 6, 7, 8, 9, 10, 11, or 12 times per hour, day, week, month, or year). More commonly, a single dose per week of an LRP6 conjugate is administered.

[0238] In therapeutic applications, a dose of an LRP6 conjugate is administered to a mammal (e.g., a human) already suffering from a disease or condition (e.g., a cancer, autoimmune disease, cardiovascular disease, bone, opthalmology) in an amount sufficient to cure or at least partially arrest or alleviate one or more of the symptoms of the disease or condition and its complications. An amount adequate to accomplish this purpose is defined as a “therapeutically effective dose.” Amounts effective for this use may depend on the severity of the disease or condition and general state of the patient, but generally range from about 0.5 mg to about 400 mg of an LRP6 conjugate per dose (e.g., 10 mg, 50 mg, 100 mg, 200 mg, 300 mg, or 400 mg or more per dose). A dose of an LRP6 conjugate can be administered therapeutically to a patient one or more times per hour, day, week, month, or year (e.g., 2, 4, 5, 6, 7, 8, 9, 10, 11, or 12 times per hour, day, week, month, or year). More commonly, a single dose per week of an LRP6 conjugate is administered.

[0239] In several embodiments, the patient may receive an LRP6 conjugate in the range of about 0.5 to about 400 mg per dose one or more times per week (e.g., 2, 3, 4, 5, 6, or 7 or more per week), preferably about 5 mg to about 300 mg per dose one or more times per week, and even more preferably about 5 mg to about 200 mg per dose one or more times per week. The patient may also receive a biweekly dose of an LRP6 conjugate in the range of about 50 mg to about 800 mg or a monthly dose of an LRP6 conjugate in the range of about 50 mg to about 1,200 mg.

[0240] In other embodiments, an LRP6 conjugate may be administered to a patient in a typical dosage range of about 0.5 mg per week to about 2000 mg per week, about 1.0 mg per week to about 1000 mg per week, about 5 mg per week to about 500 mg per week, about 10 mg per week to about 100 mg per week, about 20 mg per week to about 80 mg per week, about 100 mg per week to about 300 mg per week, or about 100 mg per week to about 200 mg per week. In another aspect, the dosages for administration to a 70 kg patient can range from, for example, about 1 μg to about 5000 mg, about 2 μg to about 4500 mg, about 3 μg to about 4000 mg, about 4 μg to about 3,500 mg, about 5 μg to about 3000 mg, about 6 μg to about 2500 mg, about 7 μg to about 2000 mg, about μg to about 1900 mg, about 9 μg to about 1,800 mg, about 10 μg to about 1,700 mg, about 15 μg to about 1,600 mg, about 20 μg to about 1,575 mg, about 30 μg to about 1,550 mg, about 40 μg to about 1,500 mg, about 50 μg to about 1,475 mg, about 100 μg to about 1,450 mg, about 200 μg to about 1,425 mg, about 300 μg to about 1,000 mg, about 400 μg to about 975 mg, about 500 μg to about 650 mg, about 0.5 mg to about 625 mg, about 1 mg to about 600 mg, about 1.25 mg to about 575 mg, about 1.5 mg to about 550 mg, about 2.0 mg to about 525 mg, about 2.5 mg to about 500 mg, about 3.0 mg to about 475 mg, about 3.5 mg to about 450 mg, about 4.0 mg to about 425 mg, about 4.5 mg to about 400 mg, about 5 mg to about 375 mg, about 10 mg to about 350 mg, about 20 mg to about 325 mg, about 30 mg to about 300 mg, about 40 mg to about 275 mg, about 50 mg to about 250 mg, about 100 mg to about 225 mg, about 90 mg to about 200 mg, about 80 mg to about 175 mg, about 70 mg to about 150 mg, or about 60 mg to about 125 mg, of an HSA linker conjugate provided herein. Dosage regimen may be adjusted to provide the optimum therapeutic response. In another aspect, an LRP6 conjugate may be administered in the range of about 0.5 mg every other day to about 500 mg every other day, preferably about 5 mg every other day to about 75 mg every other day, more preferably about 10 mg every other day to about 50 mg every other day, and even more preferably 20 mg every other day to about 40 mg every other day. An LRP6 conjugate may also be administered in the range of about 0.5 mg three times per week to about 100 mg three times per week, preferably about 5 mg three times per week to about 75 mg three times per week, more preferably about 10 mg three times per week to about 50 mg three times per week, and even more preferably about 20 mg three times per week to about 40 mg three times per week.

[0241] In non-limiting embodiments of the methods of the present invention, an LRP6 conjugate is administered to a mammal (e.g., a human) continuously for 1, 2, 3, or 4 hours; 1, 2, 3, or 4 times a day; every other day or every third, fourth, fifth, or sixth day; 1, 2, 3, 4, 5, 6, 7, 8, 9, or 10 times a week; biweekly; 1, 2, 3, 4, 5, 6, 7, 8, 9, 10, 11, 12, 13, 14, 15, 16, 17, 18, 19, 20, 21, 22, 23, 24, 25, 26, 27, 28, 29, or 30 times a month; bimonthly; 1, 2, 3, 4, 5, 6, 7, 8, 9, or 10 times every six months; 1, 2, 3, 4, 5, 6, 7, 8, 9, 10, 11, 12, 13, 14, 15, 16, 17, 18, 19, or 20 times a year; or biannually. An LRP6 conjugate may be administered at different frequencies during a therapeutic regime. In additional embodiments, an LRP6 conjugate may be administered to a patient at the same frequency or at a different frequency.

[0242] The amount of one or more diagnostic or therapeutic agents and an LRP6 conjugate required to achieve the desired therapeutic effect depends on a number of factors, such as the specific diagnostic or therapeutic agent(s) chosen, the mode of administration, and clinical condition of the recipient. A skilled artisan will be able to determine the appropriate dosages of one or more diagnostic or therapeutic agents and an LRP6 conjugate to achieve the desired results.

[0243] Single or multiple administrations of the compositions comprising an effective amount of an LRP6 conjugate can be carried out with dose levels and pattern being selected by the treating physician. The dose and administration schedule can be determined and adjusted based on the severity of the disease or condition in a mammal (e.g., a human), which may be monitored throughout the course of treatment according to the methods commonly practiced by clinicians or those described herein.

[0244] An LRP6 conjugate can be administered to a mammalian subject, such as a human, directly or in combination with any pharmaceutically acceptable carrier or salt known in the art. Pharmaceutically acceptable salts may include non-toxic acid addition salts or metal complexes that are commonly used in the pharmaceutical industry. Examples of acid addition salts include organic acids such as acetic, lactic, pamoic, maleic, citric, malic, ascorbic, succinic, benzoic, palmitic, suberic, salicylic, tartaric, methanesulfonic, toluenesulfonic, or trifluoroacetic acids or the like; polymeric acids such as tannic acid, carboxymethyl cellulose, or the like; and inorganic acids such as hydrochloric acid, hydrobromic acid, sulfuric acid phosphoric acid, or the like. Metal complexes include zinc, iron, and the like. One exemplary pharmaceutically acceptable carrier is physiological saline. Other physiologically acceptable carriers and their formulations are known to one skilled in the art and described, for example, in Remington's Pharmaceutical Sciences, (18^{th} edition), ed. A. Gennaro, 1990, Mack Publishing Company, Easton, Pa. Diagnostic and Therapeutic Applications

[0245] LRP6 conjugates can be used for diagnostic and therapeutic applications in a human, including, for example, the diagnosis or treatment of proliferative diseases (e.g., cancers, such as melanoma, clear cell sarcoma, and renal cancer) and autoimmune diseases (e.g., multiple sclerosis, rheumatoid arthritis, and uveitis). The following discussion of human proliferative and autoimmune diseases is meant to provide the skilled practitioner with a general understanding of how LRP6 conjugates can be applied in diagnostic and therapeutic applications and is not meant to limit the scope of the present invention.

[0246] The invention having been fully described, it is further illustrated by the following examples and claims, which are illustrative and are not meant to be further limiting.

### EXAMPLES

### Example 1

### Generation of Anti-LRP6 Mono and Biparatopic Serum Albumin Fusions

[0247] This example describes the production and characterization of mono-specific and biparatopic anti-LRP6 antibodies designed as fusions of anti-LRP6 Fab to serum albumin for mono-specific formats and as fusions of anti-LRP6 Fab and anti-LRP6 scFv or scFab to serum albumin for biparatopic formats. In addition to fusions with wild type mouse serum albumin (MSA), fusions were also prepared where the free cysteines in MSA or human serum albumin (HSA) were mutated to serines (MSA(C:S) or HSA(C:S)). The mono-specific variants were designed by C-terminal addition of MSA, MSA(C:S) or HSA(C:S) to anti-LRP6 Fab. The biparatopic variants were designed by C-terminal addition of either anti-LRP6 scFv or anti-LRP6 scFab (Fab with 6× Gly₄Ser-linker between CL and VH) to anti-LRP6 Fab MSA or anti-LRP6 Fab MSA(C:S)/HSA(C:S) backbone.

### (a) Materials and Methods

### (i) Generation of Mono-Specific Anti-LRP6 Fabs Fused to Serum Albumin

### Anti-LRP6_MOR08168Fab-MSA

[0248] MOR08168-VH was amplified from vector pMORPHx9-FH-MOR08168 and the PCR product was cloned via NruI/BlpI into vector pRS5a-MOR06706-MSA (primer 1: gctacgtcgcgattctggaaggcgtgcactgtcaggtgcaattggtggaaagc (SEQ ID NO: 301), primer 2: gctacggctagctgagctaaccgtcaccag (SEQ ID NO:302). The resulting vector was called pRS5a-MOR08168-MSA.

[0249] MOR08168-VL was amplified from vector pMORPHx9-FH-MOR08168 and the PCR product was cloned via AgeI/HindIII into vector pRS5a-hlambda-MOR06706 (primer 3: gctacgaccggtgatatcgaactgacccagccg (SEQ ID NO: 303), primer 4: gctacgaagcttcgtgccgccgccaaac (SEQ ID NO: 304). The resulting vector was called pRS5a-hlambda-MOR08168.

### Anti-LRP6_MOR08168 Fab-MSA (C:S)

[0250] Substitution C58S within the MSA gene was introduced by QuickChange Site-Directed Mutagenesis (Agilent) in vector pRS5a-MSA-MOR08168 (primer 5: cagtacctgcagaagtccagctacgacgagcac (SEQ ID NO: 305), primer 6: gtgctcgtcgtagctggacttctgcaggtactg (SEQ ID NO: 306).

[0251] Substitution C6035 within the MSA gene was introduced by PCR followed by cloning of the PCR product via AgeI/AscI into vector pRS5a-MSA-MOR0168_C585 (primer 7: ggcccacaagagcgagatcgccc (SEQ ID NO: 307), primer 8: gcggccgcccggcgcgcctcatcagtgatggtgatgatggtgggccagggcgtccttggaccgggtcaccaggttggg (SEQ ID NO: 308). Finally gene optimized MOR08168-VH was amplified from Geneart vector 0924690_{—}8168sc-fvCH1mut_cys and cloned via MfeI/BlpI into vector pRS5a-MSA-MOR08168_C58S_C6035, the resulting vector was called pRS5a-MSA-MORO8168opt_C58S_C603S (primer 9: tgtcaggtgcaattggtcgagtctggcggaggactg (SEQ ID NO: 309), primer 10: ccttggtgctggctgagctg (SEQ ID NO: 310). Gene optimized MOR08168-VL was amplified from the Geneart vector 0924690_{—}8168sc-fvCH1mut_cys and cloned via AgeI/HindIII into vector pRS5a-hlambda. The resulting vector was called pRS5a-hlambda-MOR08168opt (primer 11: gcttccggacaccaccggtgacatcgagctgacccagcc (SEQ ID NO: 311), primer 12: cagcacggtaagcttggtgcctccgccgaacaccag (SEQ ID NO: 312).

### Anti-LRP6_MOR08168Fab-HSA (C:S)

[0252] A DNA fragment coding for HSA-C:S was isolated from vector pRS5aHSAcys and cloned via NheI/AscI into pRS5a-MSA-MOR08168opt_C58S_C603S. The resulting vector was called pRS5a-MOR08168opt_HSA_CtoS. MOR08168-LC (pRS5a-hlambda-MOR08168opt) was generated as described for anti-LRP6_MOR08168 Fab-MSA (C:S).

### Anti-LRP6_MOR08545 Fab-MSA

[0253] A gene optimized DNA fragment coding for MOR08545-VH was isolated from Geneart vector 0814746_MOR08545_heavy-mamma via NruI/NheI and cloned into vector pRS5a-h-IgG1(MV)-MSA, the resulting vector was called pRS5a-MSA-MOR08545. A gene optimized DNA fragment coding for MOR08545-VL was isolated from Geneart vector 0814747_MOR08545_light_mamma via AgeI/NarI and cloned into vector pRS5a-h-lambda, the resulting vector was called pRS5a-h-lambda-MOR08545.

### Anti-LRP6_MOR06707 Fab-MSA

[0254] A gene optimized DNA fragment coding for MOR06707-VH was isolated from Geneart vector 0814748_MOR06707_heavy_mamma via NruI/NheI and cloned into pRS5a-MSA-MOR08545, the resulting vector was called pRS5a-MSA-MOR06707. A gene optimized DNA fragment coding for MOR06707-VL was isolated from Geneart vector 0814749_MOR06707_light_mamma via AgeI/NarI and cloned into vector pRS5a-h-lambda, the resulting vector was called pRS5a-h-lambda-MOR06707.

### Anti-LRP6_MOR06706 Fab-MSA

[0255] MOR06706-VH was amplified from vector pMORPHx9-FH-MOR06706 and the PCR product was cloned via NruI/NheI into vector pRS5a(MV)-hIgG1-MSA-6707-SalI (primer 27: gctacgtcgcgattctggaaggcgtgcactgtcaggtgcaattggtggaaagc (SEQ ID NO: 313), primer 28: gctacggctagctgagctaaccgtcaccag (SEQ ID NO: 314). The resulting vector was called pRS5a-hIgG1-MOR06706-SalI-MSA. A HindIII site upstream of the start codon in vector pRS5a-hlambda-MOR06707 was removed by QuickChange Site-Directed Mutagenesis (Agilent) (primer 29: ggtccaactgcacggtagctttctagagccg (SEQ ID NO: 315), primer 30: cggctctagaaagctaccgtgcagttggacc (SEQ ID NO: 316). In a second mutagenesis step a HindIII site was integrated between sequence regions coding for VL and CL in vector pRS5a-hlambda-MOR06707-w/o-HindIII (primer 31: gcggaacaaagcttaccgtgctgggcc (SEQ ID NO: 317), primer 32: ggcccagcacggtaagctttgttccgc (SEQ ID NO: 318). MOR06706-VL was amplified from vector pMORPHx9-FH-MOR06706 and the PCR product was cloned via AgeI/HindIII into mutated vector pRS5a-hlambda-MOR06707 (primer 33: gctacgaccggtgatatcgaactgacccagccg (SEQ ID NO: 319), primer 34: gctacgaagcttcgtgccgccgccaaac (SEQ ID NO: 320). The resulting vector was called pRS5a-hlambda-MOR06706.

### Anti-LRP6 MOR06475 Fab-MSA

[0256] MOR06475 Fab was fused to the N-terminus of MSA using vector pRS5a with the VH leader sequence. There was a hinge linker in between MOR06475 and MSA. The Hinge linker sequence was DKTHT. The resulting vector was called pRS5a-MSA-MOR6475 501. The protein was expressed in 293T suspension cells and purified by KappaSelect.

Anti-LRP6 MOR06475 scFv-MSA

[0257] MOR06475 scFv in LH orientation was fused to N-terminal of MSA using vector pRS5a with the VH leader sequence. There was a (Gly₄Ser)₂ linker between MOR06475 scFv and MSA. There was a His tag at the C-terminal of MSA for purification purpose. The resulting vector was called pRS5a-scFv6475-MSA 507. The protein was expressed in 293T suspension cells and purified by NTi resin from Qiagen.

### (ii) Generation of Biparatopic Anti-LRP6 Constructs Based on Fusion to Serum Albumin

[0258] Anti-LRP6_MOR08168 Fab-MSA (C:S) MOR06475 scFv

[0259] BstEII restriction site was introduced in vector pRS5a-MOR08168opt-HSA-C to S by QuickChange Site-Directed Mutagenesis (Agilent), primer 13: ggccagggcacacttgtgaccgtcagctc (SEQ ID NO: 321), primer 14: gagctgacggtcacaagtgtgccctggcc (SEQ ID NO: 322). The resulting vector was called pRS5a-MOR08168opt-MSA-C58S-C603S_{—}1BsteII_site. MOR06475 scFv was amplified from vector pRS5a-MOR06475-scFv and the PCR product was cloned into vector pRS5a-MOR08168opt-MSA-C58S-C603S_{—}1BsteII_site via BstEII/XbaI (primer 15: ggccccaacctggtgacccggtccaaggacgccctggccggcggctccggcggaagcgatatcgtgctgacacagagccc (SEQ ID NO: 323), primer 16: gtttaaacgggccactagagcggccgcccggcgcgcctcagaggacactgtcaccagggttc (SEQ ID NO: 324). The resulting vector was called pRS5a-MOR08168opt-MSA-CtoS-6475scFv. MOR08168-LC (pRS5a-hlambda-MOR08168opt) was generated as described for anti-LRP6_MOR08168 Fab-MSA (C:S).

Anti-LRP6_MOR08168 Fab-HSA (C:S) MOR06475 scFv

[0260] AfeI restriction site was introduced in vector pRS5a-MOR08168opt-HSA-C58S_C603S by QuickChange Site-Directed Mutagenesis (Agilent), primer 17: gcggccagtcaggcagcgcttggtttgtgatg (SEQ ID NO: 325), primer 18: catcacaaaccaagcgctgcctgactggccgc (SEQ ID NO: 326). The resulting vector was called pRS5a-MOR08168opt-HSA-CtoS_AfeI. MOR06475-scFv was amplified from vector pRS5a-hIgG1LALA-MOR08168opt-6475scFv and the PCR product was cloned into vector pRS5a-MOR08168opt-HSA-CtoS_AfeI via AfeI/XbaI (primer 19: caggcagcgcttggtttgggcggctccggcggaagcgatatcg (SEQ ID NO: 327), primer 20: gggtttaaacgggccctctagagc (SEQ ID NO: 328). The resulting vector was called pRS5a-MOR08168opt-HSA-CtoS-6475-scFv. MOR08168-LC (pRS5a-hlambda-MOR08168opt) was generated as described for anti-LRP6_MOR08168 Fab-MSA (C:S).

Anti-LRP6_MOR08168 Fab-HSA (C:S) MOR06475 scFab

[0261] MOR06475 scFab was amplified from vector pRS5a-hkappa-linker-hIgG1LALA-MOR06475 (coding for the full IgG1LALA with a 6× Gly₄Ser-linker between CL and VH) and the PCR product was cloned into vector pRS5a-MOR08168opt-HSA-CtoS_AfeI via AfeI/XbaI (primer 21: caggcagcgcttggtttgggcggctccggcggaagcgatatcgtgctgacccagagcc (SEQ ID NO: 329), primer 22: gccctctagagcggccgcccggcgcgcctcatcagcagctcttgggctccactctcttg (SEQ ID NO: 330). The resulting vector was called pRS5a-MOR08168opt-HSA-CtoS-6475-scFab. MOR08168-LC (pRS5a-hlambda-MOR08168opt) was generated as described for anti-LRP6_MOR08168 Fab-MSA (C:S).

(iii) Transient Expression of Mono-Specific and Biparatopic Anti-LRP6 Fab MSA/MSA(C:S)/HSA(C:S) Fusions

[0262] 3-4 L HEK293 cells were cultivated in V3 Media: Lot #D07668B in a BioWave20 at Rocks 10 rpm, Angle 7°, Aeration 25 L/h, 25% O₂, 6% CO₂ to a density of 2E6 viable cells/mL. The cells were transiently transfected with 1-2 L DNA:PEI-MIX in V3 media (plasmid: 5 mg HC+5 mg LC+20 mg PEI). 6 h after transfection 5 L Feeding media (Novartis): Lot #09-021 was added to the culture. The cells were then further cultivated at Rocks 24 rpm, Angle: 7°, Aeration 25 L/h, 25% O₂, 0-6% CO₂. Seven to ten days after transfection, cells were removed by crossflow filtration using Fresenius filters 0.2 μm. Afterwards the cell free material was concentrated to 1.75 L with cross-flow filtration using a 10 kDa cut off filter from Fresenius. The concentrate was sterile filtered through a stericup filter (0.22 μm). The sterile supernatant was stored at 4° C.

[0263] All described anti-LRP6 Fab fusion variants were expressed in a similar manner to that described above.

### (iv) Purification of Mono-Specific and Biparatopic Anti-LRP6 Fab MSA/MSA(C:S)/HSA(C:S) Fusions

[0264] Purification was performed on an ÄKTA 100 explorer Air chromatography system at 4° C. in a cooling cabinet, using a freshly sanitized (0.5 M NaOH/30% isopropanol) XK16/20 column with 10 ml of CaptureSelect Fab lambda affinity matrix (BAC #0849.10). All flow rates were 2 ml/min, except for loading, 1 ml/min. The column was equilibrated with 10 CV of PBS (made from 10×, Gibco), then the concentrated and sterile filtered fermentation supernatant (ca. 1 l) was loaded at 1.0 ml/min. The column was washed with 10 CV of PBS. Then the Fab fusion was eluted with 5 CV of 100 mM Glycine/HCl-Buffer pH 3.0. The eluate was collected in 3 ml fractions in tubes containing 0.3 ml of 1M Tris/HCl pH 9.0. The pools were sterile filtered (Millipore Steriflip, 0.22 μm), the OD 280 nm was measured in a Lambda 35 Spectrometer (Perkin Elmer), and the protein concentration was calculated based on the sequence data. The pools were separately tested for aggregation (SEC-MALS) and purity (SDS-PAGE, LAL and MS), and based on the results, only the central pool was further used. For second purification steps, pools from the first purification were loaded into a freshly sanitized (0.5 M NaOH/30% isopropanol) HiLoad 26/60-Superdex200 column (GE-Healthcare), the run was done with PBS at 1 ml/min, the eluate was collected in 4 ml fractions and analyzed as described for the first purification step.

[0265] All described biaparatopic anti-LRP6 Fab fusion variants were purified in a similar manner to that described above.

(v) Size Exclusion Chromatography Coupled with Multi-Angle Light Scattering Detector (SEC-MALS)

[0266] SEC-MALS measurements were performed on an Agilent 1200 HPLC system (Agilent Technologies) connected to a tri-angle light scattering detector (miniDAWN Treos, Wyatt Technology, Santa Barbara, Calif., USA). The concentration of the sample was followed online with a differential refractometer (Optilab rEX, Wyatt Technology) using a specific refractive index increment (dn/dc) value of 0.186 ml/g (Wen et al., 1996 Anal Biochem. 240:155-66). Sample volumes of 50 μl were injected on a Superdex 200 10/300 GL column (GE Healthcare). The data were recorded and processed using the ASTRA V software (Wyatt Technology). To determine the detector delay volumes and normalization coefficients for the MALS detector, a BSA sample (Sigma, Catalog #A8531) was used as reference. Neither despiking nor a band broadening correction was applied.

### Example 2

### Generation of a Biparatopic LRP6 Antibody Half Molecule

[0267] This example describes the production and characterization of biparatopic anti-LRP6 IgG1 LALA antibody half-molecules. Antibody half-molecules were engineered using a combination of hinge mutations (cysteines to glycines or serines) to prevent disulfide bond formation and CH3 mutations (F405T and Y407D) to disrupt the non-covalent bonds. Biparatopic variants were designed by C-terminal fusion of anti-LRP6 scFv to anti-LRP6 antibody half-molecule. Variants with an additional CH2 and CH3 (F405T, Y407D) domain were also produced.

### (a) Materials and Methods

### (i) Generation of Biparatopic LRP6 Antibody Half Molecule

[0268] Anti-LRP6_MOR08168 hIgG1LALA (mut Hinge F:T; Y:D) MOR06475 scFv

[0269] Both cysteines within the hinge region of MOR08168opt-hIgG1LALA were substituted to glycines by QuickChange Site-Directed Mutagenesis (Agilent) in vector pRS5a-hIgG1LALA-MOR08168opt-6475scFv (primer 23: caagacccacaccggcccccccggcccagccccagaggc (SEQ ID NO: 331), primer 24: gcctctggggctgggccgggggggccggtgtgggtcttg (SEQ ID NO: 332). Furthermore substitutions FtoT and YtoD were introduced in the CH3 domain of vector pRS5a-hIgG1LALA-MOR08168opt-6475scFv_mut_Hinge by QuickChange Site-Directed Mutagenesis (Agilent), primer 25: gcgacggcagcttcaccctggacagcaagctgacc (SEQ ID NO: 333), primer 26: ggtcagcttgctgtccagggtgaagctgccgtcgc (SEQ ID NO: 334). The resulting vector was called pRS5a-hIgG1LALA-MOR08168opt-6475scFv_mut-Hinge_FtoT_YtoD. MOR08168-LC (pRS5a-hlambda-MOR08168opt) was generated as described for anti-LRP6_MOR08168 Fab-MSA (C:S) in the previous example.

Anti-LRP6_MOR08168 hIgG1LALA 2(CH2_CH3) (mut Hinge F:T; Y:D) MOR06475 scFv

[0270] A gene optimized DNA fragment coding for the complete CH2/3-domain of hIgG1LALA (mut Hinge F:T; Y:D) was isolated from DNA2.0 vector 49692_CLONED and cloned via AfeI/BamHI into vector pRS5a-hIgG1LALA-MOR08168opt-6475scFv_mut-Hinge_FtoT_YtoD. The resulting vector was called pRS5a-hIgG1LALA-MOR08168opt-2×CH2/3-6475scFv_mut-Hinge_FtoT_YtoD. MOR08168-LC (pRS5a-hlambda-MOR08168opt) was generated as described for anti-LRP6_MOR08168 Fab-MSA (C:S) in the previous example.

### (ii) Transient Expression of Biparatopic Anti-LRP6 Antibody Half Molecule

[0271] Transient expression was performed as described in example 1 above.

(iii) Purification of Biparatopic Anti-LRP6 Antibody Half Molecules
Anti-LRP6_MOR08168 hIgG1LALA (mut Hinge F:T; Y:D) MOR06475 scFv

[0272] The purification of the biparatopic antibody half molecule was performed on an ÄKTA 100 explorer Air chromatography system at 4° C. in a cooling cabinet, using a 5 ml HiTrap Protein G column (GE-Healthcare). All flow rates were 3 ml/min, except for loading, 1 ml/min. The column was equilibrated with 10 CV of PBS (made from 10×, Gibco), then the concentrated and sterile filtered fermentation supernatant (ca. 1 L) was loaded at 1.0 ml/min. The column was washed with 10 CV of PBS. Then the antibody half-molecule was eluted with a gradient from 100 mM Glycine/HCl-Buffer pH 4.5 to 100 mM Glycine/HCl-Buffer pH 2.5 (12 CV) followed by 6 CV of 100 mM Glycine/HCl-Buffer pH 2.0. Fractions (1 ml) corresponding to detected peak were pooled and neutralized by addition of 10% vol. of 1M Tris/HCl pH 9.0. The pools were sterile filtered (Millipore Steriflip, 0.22 μm), the OD 280 nm was measured in a Lambda 35 Spectrometer (Perkin Elmer), and the protein concentration was calculated based on the sequence data. The pools were separately tested for aggregation (SEC-MALS) and purity (SDS-PAGE, LAL and MS), and based on the results, only the central pool was further used.

Anti-LRP6_MOR08168 hIgG1LALA 2(CH2_CH3) (mut Hinge F:T; Y:D) MOR06475 scFv

[0273] The purification of the biparatopic antibody half molecule was performed on an ÄKTA 100 explorer Air chromatography system at 4° C. in a cooling cabinet, using a 5 ml HiTrap MabSelect Sure column (GE-Healthcare). All flow rates were 5 ml/min. The column was equilibrated with 5 CV of PBS (made from 10×, Gibco), then the concentrated and sterile filtered fermentation supernatant (ca. 1 l) was loaded at 5.0 ml/min. The column was washed with 5 CV of PBS followed by 5 CV of 50 mM Citrate, 90 mM NaCl pH 5.5. Then the antibody half-molecule was eluted with 5 CV of 50 mM Citrate, 90 mM NaCl pH 3.0 in 4 ml fractions. Fractions corresponding to detected peak were pooled and neutralized by addition of 1M NaOH to pH 6-7. The pools were sterile filtered (Millipore Steriflip, 0.22 μm), the OD 280 nm was measured in a Lambda 35 Spectrometer (Perkin Elmer), and the protein concentration was calculated based on the sequence data. The pools were separately tested for aggregation (SEC-MALS) and purity (SDS-PAGE, LAL and MS), and based on the results, only the central pool was further used.

(iv) Size Exclusion Chromatography Coupled with Multi-Angle Light Scattering Detector (SEC-MALS)

[0274] SEC-MALS was performed as in example 1 of this application.

### Example 3

### Expression, Purification and Characterization of Anti-LRP6 Mono and Biparatopic Serum Albumin Fusions and Biparatopic LRP6 Antibody Half Molecules

[0275] All serum albumin fused constructs were successfully expressed and purified. The purified products were checked by SDS-PAGE and showed bands corresponding to their expected size. Further verification by mass spectrometry (MS) demonstrated that anti-LRP6 MOR08168 Fab-HSA (C:S) MOR06475-scFv, anti-LRP6 MOR08168 Fab-MSA (C:S) MOR06475-scFv, anti-LRP6 MOR08168 Fab-MSA, anti-LRP6 MOR08168 Fab-HSA (C:S) and anti-LRP6 MOR06706-MSA corresponded to their expected mass (140207, 139611, 113851, 113594 and 113931 Da, respectively) but with a pyroglutamic acid at the N-terminus. The light chain from anti-LRP6 MOR08168 Fab-HSA (C:S) MOR06475-scFab also corresponded to its expected mass (22837 Da) and the heavy chain was verified by tryptic peptide mass fingerprint (MALDI-TOF and MALDI-TOF/TOF). Aggregation, as determined by SEC MALS, was less than 6% for all anti-LRP6 mono and biparatopic serum albumin fusions.

[0276] The biparatopic anti-LRP6 IgG1 antibody half-molecules were also well expressed in monomeric form. Bands corresponding to their expected size were detected by SDS-PAGE. Further verification by MS demonstrated that MOR08168-hIgG1LALA (mut Hinge F:T; Y:D) MOR06475-scFv and MOR08168-hIgG1LALA 2(CH2_CH3) (mut Hinge F:T; Y:D) MOR06475-scFv corresponded to their expected mass (98536 and 123301 Da respectively) but with a pyroglutamic acid at the N-terminus and glycosylation. Aggregation, determined by SEC MALS, was less than 6% for both variants.

### Mass Spectrometry Analyses:

[0277] All molecules generated for this work were analyzed by mass spectrometry to check their integrity and purity. A standard QC method was in applied, which consists of an LC-MS analysis of the intact molecule and by at least one LC-MS analysis following a treatment of the sample, (i) deglycosylation, (ii) reduction, (iii) reduction and deglycosylation, (iv) reduction and carboxyamidomethylation.

[0278] In the case of anti-LRP6 MOR08168 Fab-HSA (C:S) MOR06475-scFab, the identity of the heavy chain had to be confirmed by tryptic peptide mapping.

### LC-MS Instrumentation:

[0279] The liquid chromatography (LC) was performed on a Waters Acquity UPLC system coupled directly to the mass spectrometer. Solvent A: 2% CH₃CN in H₂O 0.1% formic acid, and solvent B: CH₃CN 0.1% formic acid. The intact sample (4 μg) were separated on MassPrep Cartridge (0.4 mL/min, Waters) with the following gradient: in 5 min from 0% B to 90% B. The treated sample (4 μg) were separated on POROS 10 R1 column (150×1 mm, Morey), with a flow rate of 0.1 μL/min with the following gradient: in 0.5 min from 0% B to 22% B, then in 10 min to 44% B, then in 1 min to 90% B, stay at 90% B for 2 min then back to 0% B.

[0280] The electrospray ionization time-of-flight (ESI_TOF) mass spectrometer (Waters Q_TOF Premier Mass Spectrometer) was operated in the positive V-mode, under a source temperature of 120° C., a desolvation temperature of 250° C., a sample cone set at 40 V, and 0.95 Hz scan rate with 0.05 s interscan delay was used to acquire data over the entire analysis. For intact and treated sample measurement, the capillary voltage was set to 1.5 kV and 2.8 kV, and mass spectra were acquired in the m/z range of 1000 to 6000 and 600 to 2000, respectively. Evaluation was performed after deconvolution of the ESI-TOF spectra.

### Sample Treatment:

### (i) Deglycosylation:

[0281] 25 μg of lyophilized human IgG are dissolved in 5 μL of 8M urea containing 0.4 M NH₄HCO₃. Then 37 μL of 50 mM NH₄HCO₃ is added (pH 8.3), followed by 5 μL of reaction buffer G7 and by 1.6 μL of PNGaseF (New England Biolabs, Ipswich, Mass.) and the mixture is incubated at 37° C. for 70 min.

### (ii) Reduction:

[0282] 25 μg of lyophilized human IgG are reduced (for 30 min at 50° C. under nitrogen) with 1.2 μL 1 M DTT after dissolution in 5 μL of 8 M urea/0.4 M NH₄HCO₃ (pH 8.3) followed by the addition of 5 μL of 50 mM NH₄HCO₃ (pH 8.3).

(iii) Reduction/Deglycosylation

[0283] 25 μg of lyophilized human IgG are reduced with 1.2 μL 1 M DTT after dissolution in 5 μL of 8 M urea/0.4 M NH₄HCO₃ and 5 μL of 50 mM NH₄HCO₃ (pH 8.3). After 30 min incubation at 50° C., 5 μL of reaction buffer G7 and 32 μL of 50 mM NH₄HCO₃ (pH 8.3) are added followed by 1.6 μL of PNGaseF (New England Biolabs, Ipswich, Mass.) and the mixture is incubated at 37° C. for 70 min.

(iii) Reduction/Carboxyamidomethylation

[0284] 100 μg of lyophilized human IgG are dissolved in 80 μL of 8M urea/g 0.4 M NH₄HCO₃ (pH 8.3), then after addition of 2.3 μL 1 M DTT, the mixture is put under nitrogen and incubated at 50° C. for 30 min. The solution is then cooled down to room temperature, 6.5 μL of 1 M iodoacetamide is added and the mixture is incubated for 30 min at room temperature in the dark. The reaction is stopped by an addition of 10% formic acid to reach pH 3-4.

### MALDI-MSMS Analysis:

[0285] The carboxyamidomethylated sample (iv) was injected on HPLC for desalting and collecting of each chain. About 4.4 μg of HC was collected and dried on SpeedVac. After dissolution of the c carboxyamidomethylated HC (5 μl 8 M urea 0.4 M NH₄HCO₃+40 μl 0.4 M NH₄HCO₃+1 μl 1 M Tris pH 10), 1 μl of trypsin (1 μg/μl, Promega) was added and left for incubation overnight at 37° C. The reaction was stopped by an addition of 10% formic acid to reach pH 3-4.

[0286] An aliquot of obtained digest (2 mL) was purified by ZipTipC18 (Waters) and directly eluted onto the MALDI target with 2 μl matrix HCCA in acetonitrile/0.1% TFA H2O (50/50). MALDI-TOF MS and MSMS (Autoflex III, Bruker) spectra were acquired in positive reflectron and LIFT mode, respectively. Data evaluation was performed by MASCOT searching against an in-house sequence database.

### Example 4

### Assessment of In Vitro Activity of Anti-LRP6 Mono and Biparatopic Serum Albumin Fusions and Biparatopic LRP6 Antibody Half Molecules in Wnt Reporter Gene Assays

[0287] The ability of the anti-LRP6 mono and biparatopic serum albumin fusions and biparatopic LRP6 antibody half molecules to inhibit Wnt signaling was tested in a Wnt1 and Wnt3a responsive luciferase reporter gene assay. Cells were either stimulated with Wnt3a conditioned medium, by co-transfection of Wnt 1 or Wnt3a expression plasmids or by co-culture with Wnt1 or Wnt3a overexpressing cells as described below.

(i) Wnt3a Reporter Gene Assay with Conditioned Medium

[0288] 3×10⁴ HEK293-STF cells/well were seeded into a 96 well tissue culture plate, and cells were incubated overnight at 37° C./5% CO₂ in 100 μL medium.

[0289] The following day, various anti-LRP6 construct dilutions were prepared in PBS as 20× solutions. 20 μL/well of the supernatant was removed from the 96 well tissue culture plate and replaced by 5 μL/well of the anti-LRP6 construct dilutions and 15 μL of conditioned medium.

[0290] After incubation for 16 to 24 h at 37° C./5% CO₂, 100 μL BrightGlo Luciferase reagent (Promega) were added and plates were incubated for 10 min Luminescence was determined using either a Perkin Elmer Envision or Molecular Devices Spectramax M3/M5 plate reader.

(ii) Wnt1/Wnt3a Reporter Gene Assay with Transiently Transfected Cells

[0291] 3×10⁴ HEK293T/17 cells/well were seeded into a 96 well tissue culture plate (Costar #3903), and cells were incubated at 37° C./5% CO₂ in 100 μL medium. After 12 to 16 h, cells were transfected with Wnt expression plasmid, 1 ng/well; pTA-Luc-10×STF (Firefly luciferase construct) 50 ng/well; and phRL-SV40 (Renilla luciferase construct) 0.5 ng/well.

[0292] A transfection premix (10 μL/well) was prepared containing the plasmids listed above and 0.2 μL FuGene6/well (Roche). The transfection premix was incubated 15 min at RT and then distributed into the wells. The plate was rocked at 400 rpm for 2 min at RT and then incubated for 4 h at 37° C./5% CO₂. After 4 hr transfection incubation, antibodies were diluted in medium to 20× solutions, and added to the transfected cells (5 μL/well).

[0293] After 24 h, 75 μL/well DualGlo Luciferase reagent (Promega) were added and the plate was rocked for 10 min for cell lysis before readout of the Firefly luciferase activity as described above. After luminescence readout, 75 μL/well DualGlo Stop&Glow reagent (Promega) were added and luminescence was measured again to determine Renilla luciferase activity. For analysis, the ratio between Firefly luciferase activity and Renilla luciferase activity was calculated. For IC₅₀-determination of the anti-LRP6 constructs, the relative luciferase values were analyzed using GraphPad Prism.

(iii) Wnt1/Wnt3a Co-Culture Reporter Gene Assay

[0294] A similar assay can also be performed using co-culture of Wnt1 or other Wnt ligand over-expressing cells (e.g. CHO-K1 or L-cells) with stable STF reporter cell lines (HEK293, NIH/3T3, TM3, PA1, MDA-MB435, MDA-MB231). Briefly, 4×10⁴ STF reporter cells are plate in 30 μl per well of 96 well TC plate (Costar #3903). 2×10⁴ stable Wnt ligand expressing cells are added at 30 μl per well. Finally, 30 μl of 3× antibody dilution are added per well. Plate are incubated 37° C./5% CO₂ for 40-48 h, and luciferase signal is determined by the addition of 90 μl BrightGlo luciferase reagent (Promega) per well, incubation at room temperature with mild shaking for 10 min and measurement of luminescent signal with a suitable plate reader (e.g. Molecular Devices SpectramaxM3 or M5). Percent activity is measured as a ratio to no antibody control (100% Wnt induction).

### Results

[0295] The activity of the monovalent serum albumin fusion molecules, anti-LRP6 MOR08168 Fab-MSA, anti-LRP6 MOR08168 Fab-HSA (C:S), anti-LRP6 MOR08545 Fab-MSA, anti-LRP6 MOR06706 Fab-MSA, anti-LRP6 MOR06475 Fab-MSA and anti-LRP6 MOR06475 scFv-MSA is shown in FIG. 1. The MOR08168, MOR08545 and MOR06706 derived molecules were potent inhibitors of Wnt1 but not Wnt3a-stimulated reporter gene activity whereas the MOR06475 derived MSA-fusion constructs were potent inhibitors of Wnt3a but not Wnt1-driven signaling.

[0296] The activity of the anti-LRP6 biparatopic serum albumin fusions and biparatopic LRP6 antibody half molecules is summarized in FIG. 2. The data show that the constructs were able to inhibit both Wnt1 and Wnt3a driven signaling.

### Example 5

### Evaluation of Pharmacokinetic and Pharmacodynamic Properties of Anti-LRP6 Serum Albumin Constructs In Vivo

[0297] The pharmacokinetic (PK) and pharmacodynamic (PD) properties of several of the anti-LRP6 Fab and serum albumin constructs were further characterized in vivo in non-tumor bearing mice and also in an art recognized genetically engineered mouse model known as MMTV-Wnt1. Mammary tumors derived from MMTV-Wnt1 transgenic mice are Wnt1 dependent: for example, turning off Wnt1 expression using a tetracyclin-regulated system (Gunther et al., (2003), Genes Dev. 17, 488-501) or blocking Wnt activity using Fz8CRDFc (DeAlmeida et al., (2007) Cancer Research 67, 5371-5379) inhibits tumor growth in vivo.

[0298] To determine the PK properties of anti-LRP6 MOR08168 Fab-MSA in non-tumor bearing mice, nude mice were dosed IV with a single dose of 5 mg/kg of anti-LRP6 MOR08168 Fab-MSA. Serum concentrations of the MSA construct were determined by mass spectrometry at multiple time points after completion of the infusion (2, 8, 24, 72, 120, 168, 240 and 336 h, respectively) and results are shown in FIG. 3. The use of mass spectrometry to determine antibody and antibody-like variants serum concentrations is based upon the details described in US2007/088258, incorporated herein by reference. Samples were pH adjusted to 3.5±0.25 by adding hydrochloric acid to a final concentration of 67 mM. Pepsin was subsequently added to a final concentration of 2 μg pepsin/μL serum and the plate was capped, centrifuged briefly, and vortexed. Digestion proceeded for two hours at 37° C. in an oven.

[0299] Upon completion of pepsin digestion, samples were diluted 5× with 2M urea/1% sodium deoxycholate (DOC)/10 mM DTT/50 mM ammonium bicarbonate (pH 7.8) and the plate was vortexed. The plate was incubated at 58° C. for two hours in an oven to facilitate disulfide bond reduction by DTT. IAA was added to a final concentration of 20 mM and the plate incubated at ambient temperature in the dark for 1 h to carboxamidomethylate free cysteine residues. 0.75 μg porcine/O_, serum was added. The plate was capped, briefly centrifuged, and vortexed. Samples were digested overnight at 37° C. in an oven. Formic acid was added the following day to a final concentration of 1% (v/v) to terminate the digestion.

[0300] Digests were cleaned-up by solid phase extraction (SPE) using Oasis MCX 96-well 30 μm, 30 mg plates (Waters Corp.) in a vacuum manifold. The manufacturer's recommended protocol was followed with minor modifications. Briefly, Oasis MCX wells were prewashed with 1.0 mL methanol followed by 1.0 mL HPLC grade water. Samples were loaded and then washed with 2×1 mL 1% acetic acid followed by 2×1 mL methanol. Subsequently, 1 mL 5% ammonium hydroxide in 50% methanol, 45% ethanol was used to elute into 96-well 2 mL collection plates. Samples were evaporated to dryness and stored at ≦−50° C. Prior to HPLC-MS/MS analysis, the digests were freshly reconstituted in 1% trifluoracetic acid.

[0301] 2.5 μL serum equivalent was injected onto an Agilent 1100 capillary HPLC. MS/MS analysis was performed on a Quantum Vantage (Thermo-Fisher) operating in SRM mode. Concentration values were determined by comparing peak area ratios of a single peptide representative of the anti-LRP6 molecule normalized to an internal standard peptide to a standard curve generated by serially diluting anti-LRP6 molecule into the corresponding matrix.

[0302] The effect of anti-LRP6 MOR08168 Fab-MSA on Wnt-signaling in MMTV-Wnt1 tumors was also evaluated. In these studies, MMTV-Wnt1 tumors were dosed intravenously (IV) with a single dose of 5 mg/kg of anti-LRP6 MOR08168 Fab-MSA and serum concentrations of the antibody as well as the mRNA expression of the β-catenin target gene Axin2 were analyzed over a period of 14 days. The results are shown in FIG. 4. The terminal half-life of anti-LRP6 MOR08168 Fab-MSA was around 17 h. In addition, a significant decrease in Axin2 mRNA expression was observed in the tumors that recovered as the level of anti-LRP6 MOR08168 Fab-MSA in serum decreased. Similar studies were performed with anti-LRP6 MOR06706-MSA and anti-LRP6 MOR06706 Fab. Consistent with the data obtained with anti-LRP6 MOR08168 Fab and MSA-fusion, the terminal half-life of the MOR06706 Fab was around 2.7 h. In contrast, the half life of the companion MSA-fusion was around 17 h. In addition, similar to anti-LRP6 MOR08168 Fab-MSA, time and concentration dependent changes in Axin2 mRNA were observed following administration of anti-LRP6 MOR06706 Fab-MSA (FIG. 5).

[0303] Taken together, these results suggest the fusion to MSA can increase the serum half-life of anti-LRP6 Fab molecules. The data further demonstrate that Wnt1-class specific serum albumin constructs can suppress Wnt signalling in MMTV-Wnt1 xenografts and that this suppression is correlated with serum concentration.

### Example 6

### Evaluation of In Vivo Anti-Tumor Efficacy of Anti-LRP6 Serum Albumin Constructs in MMTV-Wnt1 Allograft Model

[0304] In addition to the PK-PD studies, the efficacy of the anti-LRP6 serum albumin constructs was also determined in the MMTV-Wnt1 model described in example 5 above. In these studies, MMTV-Wnt1 tumor fragments were implanted subcutaneously (SC) into female nude mice. 19 days after implantation, mice carrying MMTV-Wnt1 tumors (n=8, average 179 mm³; range: 92-380 mm³) were treated with vehicle IgG (4 mg/kg, IV, weekly (qw) or LRP6-Propeller 1 8168-Fab-MSA (6 mg/kg, IV, three times a week (3 qw) and tumors callipered twice per week. LRP6-Propeller 1 8168-Fab-MSA demonstrated antitumor activity (90% regression, p<0.05) and results are shown in FIG. 6.

### Example 7

### PEGylation of 8545 Methodology and In Vitro Characterization

### (i) Generation of an Anti-LRP6MOR08545 Fab Construct

[0305] Mutagenesis was performed on pMORPHx9-FH-MOR08545 with primer pairs (primer 35: ccgttgcgccgactgaggcctgctgataagcatgcgtagg (SEQ ID NO: 335), primer 36: cctacgcatgcttatcagcaggcctcagtcggcgcaacgg (SEQ ID NO: 336) in order to generate pMORPHx9-FH-MOR08545-2cys. Then MOR08545-VH and VL were amplified from vector pMORPHx9-FH-MOR08545-2cys with primers pairs (primer 38: cactggctggtttcgctaccg (SEQ ID NO: 337); Primer 39: cgggtggctccaatggtgatggtgatggtggaattcttatcagcagcttttcggttccactffittatc (SEQ ID NO: 338) and the PCR product was digested with EcoRI/XbaI restriction enzymes and ligated into vector pFAB-ExpCol digested with the same enzymes. The resulting construct was termed pFAB-ExpCol/MOR08545-2Cys.

### (Ii) Microbial Expression of Anti-LRP6 MOR08545 Fab

[0306] Plasmid pFAB-ExpCol/MOR08545-2Cys was transformed into E. coli BL21 (DE3) cells. Transformed E. coli cells were cultivated in a 100 L bioreactor filled with 2×YT medium+0.1% glucose at 220 rpm, 30° C., pH 7.0±0.1. At an OD₅₅₀ of 0.8 the cells were induced with IPTG and harvested by centrifugation after cultivation for an additional 8 h. 100 g wet cell pellet potions were resuspended in 800 mL of LysisBuffer (100 mM TrisHCl, 10 mM EDTA, pH 7.5) and lysis was performed for 16 h at 55° C., 400 rpm. After adding 600 U Benzonase and 5 mL MgCl₂×6H₂O (1 M) and stirring for another 1 h at room temperature the periplasmic extracts were harvested by centrifugation (1 h, 11000 g, 4° C.), pooled and cleared extracts were concentrated to 2 L by crossflow filtration using a 10 kDa cut off filter from Fresenius.

(iii) Purification of Anti-LRP6 MOR08545 Fab

[0307] Purification was performed on an ÄKTA-3D chromatography system at 4° C. in a cooling cabinet, using a freshly sanitized XK26/20 Protein A Sepharose FF column. All flow rates were 2 ml/min, except for loading, 1 ml/min. The column was equilibrated with 10 CV of PBS, and the concentrated and sterile filtered periplasmic extract (ca. 2 L) was loaded at 1.0 ml/min. The column was washed 2-times, once with 10 CV of PBS containing 0.5 M Arginine and once with 10 CV of PBS only.

[0308] Then the Fab was eluted with 5 CV of 50 mM Citrate pH 3.0, 140 mM NaCl. The eluate was collected and immediately neutralized to pH 7.0 with 1 M Tris pH 9.0-10. The pools were sterile filtered (Millipore Steriflip, 0.22 μm), the OD 280 nm was measured with a NanoDrop spectrophotometer, and the protein concentration was calculated based on the sequence data. The pools were tested for aggregation (SEC-MALS), purity (SDS-PAGE, and MS), and low endotoxin (LAL-test). Based on these results, only the central pool was further used.

### (iv) Pegylation of Anti-LRP6 MOR08545 Fab

[0309] Buffer exchange to 100 mM K-phosphate, 2 mM EDTA, pH 7.5 was performed on a Zeba column. For reduction of the interchain disulfide the Fab was treated with 40 mM TCEP followed by moderate shaking at room temperature for 30 min. TCEP removal was repeated using a Zeba column and the same conditions described above. For PEGylation, a 20-fold molar excess of SUNBRIGHT-ME-200MA (NOF Corporation Japan) was added to the reduced Fab followed by overnight shaking at room temperature. Sample were mixed with 40 mM CH₃COOH at a ratio of 1:4. Pegylation adducts were separated on a TSK-gel SP-5PW cation exchange using a step gradient of buffer A (25 mM CH₃COOH, pH 4.5) and buffer B (75 mM CH₃COOH, 150 mM NaCl, pH 8.0) and the Fab fraction with two 20 kd PEGs attached to the interchain cysteines were further tested.

### (v) Activity of Anti-LRP6 MOR08545 Fab-2×PEG20

[0310] The in vitro activity of anti-LRP6 MOR08545 2c-Fab-2×PEG20 was evaluated using the Wnt1 and Wnt3a-stimulated reporter gene assays as described in example 4. When compared to parental MOR08545 Fab, MOR08545 Fab-MSA (see example 4, FIG. 1) and MOR08545-2c-Fab, anti-LRP6 MOR08545 2c-Fab-2×PEG20 was of similar potency in both the Wnt1 and Wnt3a-stimulated assays (FIG. 7), suggesting that the addition of PEG moieties does not significantly alter the ability of MOR08545 to inhibit Wnt signaling.

[0311] The in vitro activity of anti-LRP6 MOR08545 2c-Fab-2×PEG20 was evaluated using the Wnt1 and Wnt3a-stimulated reporter gene assays as described in example 4. When compared to parental MOR08545 Fab, MOR08545 Fab-MSA (see example 4, FIG. 1) and MOR08545-2c-Fab, anti-LRP6 MOR08545 2c-Fab-2×PEG20 was of similar potency in both the Wnt1 and Wnt3a-stimulated assays (FIG. 7), suggesting that the addition of PEG moieties does not significantly alter the ability of MOR08545 to inhibit Wnt signaling.

### Example 8

### Generation of Bispecific HSA Fusion Proteins

### Materials and Methods

### Constructs

[0312] scFv6475 V_{H} and V_{L} sequences were from anti-LRP6 MOR08168 IgG1LALA MOR06475 scFv (SEQ ID NO: 166). scFv6475 in V_{L}-(Gly₄Ser)₄-V_{H} orientation was cloned into pNAT43 vector with various leader sequences to enable testing of their effect on expression. Similarly, scFv8168 V_{H} and V_{L} sequences were from anti-LRP6 MOR08168hIgG1LALA6475 scFv. scFv8168 in V_{H}-(Gly₄Ser)₄-V_{L} orientation was cloned into pNAT43 vector with pelB leader sequence. A TEV cutting site and a His tag were added to the C-terminal for purification.

[0313] For HSA fusion biparatopic constructs, scFv8168 was fused to the N-terminus of human serum albumin (HSA; SEQ ID NO: 210) while scFv6475 was fused to the C-terminus of HSA to create the fusion construct 801 (SEQ ID NO: 265), as shown in FIG. 8. The linker between scFv8168 and HSA is AAS, while the linker between HSA and 6475 is AAAL. Two point mutations C34S and N503Q were introduced into HSA to minimize the risk for oxidation and deamination, respectively. In addition, scFv8168 and scFv6475 were fused to HSA in the opposite orientation to create 802 (SEQ ID NO: 269), as shown in FIGS. 8 and 9. Two beneficial mutations for scFv8168 (VH: S34M and S49A) and one mutation for scFv6475 (VH: M100F) were introduced to make the stable version 801T (T for triple mutation) and 802T (T for triple mutation). These mutations were previously described in International Serial No. PCT/EP2011/057200, filed May 6, 2011; and PCT/EP2011/057202, filed May 6, 2011, the contents of which are incorporated herein by reference in their entirety)

[0314] Other HSA fusion biparatopic constructs were built according to FIG. 9, with the corresponding linkers and tags or lack thereof. To determine the optimal format, multiple linkers were tested: GS linker (803T (SEQ ID NO: 273) and 804T (SEQ ID NO: 275)), KTHT from upper hinge of human IgG1 (808T, SEQ ID NO: 283), no linker (802T (SEQ ID: 281), 801TF (SEQ ID NO: 293) and 802TF (SEQ ID NO: 295)). In addition, molecules in which optimized scFv8168 and scFv6475 were linked in tandem (812T, SEQ ID NO: 285) and in which HSA was positioned at C-terminal (812T-HSA; SEQ ID NO: 287) were constructed and evaluated. Single module mutant 8168scFv-HSA (809T; SEQ ID NO: 289) and mutant 6475scFv-HSA (810T; SEQ ID NO: 291) molecules were also generated.

Protein Production in Mammalian Cells and Purification with Ni-NTA

[0315] Constructs were transiently expressed in 50 ml of 293T suspension cells. Briefly, PEI was mixed with DNA 50 μg at 1:3 for optimal transfection efficiency. Cells at 1.4 e6 per ml were use for transfection. Transfected cells were collected after six days of incubation in CO₂ chamber 80 rpm shaking in filter paper flask of 250 ml. Supernatant was concentrated to around 1 ml for optimal protein recovery. Protein is purified manually by MagneHis kit according to the instructions from the manufacturer. Purified protein was dialyzed in PBS overnight with changing of buffers. Protein samples either before or after dialysis were used for DSF analysis.

### Purification of Non Tagged HSA Fusion Molecules

[0316] 293T cells transfected as described above were spun down at 1500 g for 30 minutes. Supernatant was filtered though a 0.8/0.2 μm Pall filter top unit and diluted 1:4 in 50 mM HEPES buffer (pH 7.5). GE Q Sepharose Fast Flow beads were washed in 50 mM HEPES buffer, HEPES/1 M NaCl buffer, and then HEPES buffer before use. 10 ml of beads were added to the diluted supernatant. The mixture was incubated at 4° C. for 2 h with rotation. The binding solution was transferred to a Bio-Rad 2.5×10 cm glass column with extender, and washed with 25 ml of 50 mM HEPES buffer. The protein was eluted in 10 ml fractions using elution buffer (1 M NaCl, 50 mM HEPES). Elution fractions were concentrated to 25 mg/ml using a GE Vivaspin 20 PES 5 kDa MWCO column, and then were loaded onto a HiLoad Superdex 200 26/60 SEC column using a 10 ml injection loop. The column was run at 4 ml/min at 4° C. with Gibco Dulbecco's phosphate buffered saline as the mobile phase. 5 ml fractions were collected and pooled based on purity.

### Evaluation of Constructs by Differential Scanning Calorimetry (DSC)

[0317] After expression in mammalian 293T cells and purification as described above, 400 μl of the following samples were injected into MicroCal VP-Capillary DSC system for the characterization of their thermal stability: 801 at 13.88 μM, 801T at 9.34 μM, 802 at 15.04 μM, and 802T at 9.75 μM. The DSC profiles were then analyzed in Origin with the DSC analysis program provided by MicroCal.

### Results and Discussion

### Building and Optimization of HSA Fusion Molecules

[0318] Using stability improved scFv8168 and scFc6475, a number of HSA fusion constructs were designed and constructed for the optimization of binding activity, as well as stability. There were two mutations in scFv8168 (VH: S34M and S49A) and one mutation in scFv6475 (VH: M100F), therefore these fusion molecules were termed T for triple mutations. As shown in FIG. 10, there were three modules in the constructs. In 801T and 803T, scFv8168 (VH: S34M and S49A) as module 1 was placed at the N-terminus of HSA (module 2) while scFv6475 (VH: M100F) as module 3 was located at the C-terminus of HSA. For 802T and 808T, scFv 6475 (VH: M100F) was placed at the N-terminus of HSA while scFv8168 (VH: S34M and S49A) was located at the C-terminus of HSA. scFv6475 (VH: M100F) and scFv8168 (VH: S34M and S49A) were fused in tandem in 812T, or followed by HSA in 812T-HSA.

[0319] The linker between module 1 and module 2 is referred to as linker 1 and linker 2 refers to the linker between module 2 and module 3. In 801T and 802T, linker 1 is AAS, linker 2 is AAAL. In 803T and 804T, linker 1 is Gly₄SerGlySer and linker 2 is 3× Gly₄Ser. In 808T the hinge linker KTHT was used for both linkers. There were no linkers in 801TF and 802TF and 802T no linker. 809 comprised scFv8168 and HSA connected via a 4× Gly₄Ser linker. Similarly, 810 comprised scFv6475 and HSA connected via a 4× Gly₄Ser linker.

### Expression and Non-Tag Purification of HSA Fusion Molecules

[0320] The expression of both His-tagged HSA fusion as well as non-tagged fusion molecules was in the range of 100-200 mg/L. Different linker modifications did not appear to affect the expression in mammalian cells (data not shown). The purification of non-tagged HSA fusion molecules was robust, yielding around 70-80 mg of purified protein per liter, as shown in FIG. 10. The mass of the molecules were checked by LC-MS and the molecular weight was consistent with those predicted (data not shown).

### Thermostability and Aggregation Profile of HSA Molecules

[0321] Comparing 801, 802 and their mutant counterparts for DSF and DSC profiling, the peak at 69° C. in DSF or 71-72° C. in DSC were attributed to the peaks from HSA. This was consistent with our in house data (not shown) and literature measurement of Tm of HSA (Michnik et al., 2006, J Thermal Analysis Calorimetry, 84(1) 113-117). DSC and DSF data were mostly comparable, suggesting the consistency of the measurement by different methods (FIG. 11). The triple mutants 801T and 802T demonstrated significant Tm improvement over the wild type counterpart with 7-9° C. increase for 801T over 801 and 12-13° C. increase for 802T over 802 for the first melting point during the temperature ramping. With the triple mutations, Tm of the whole fusion molecule become narrower suggesting more unified Tm among the three different components of the fusion molecule, as shown in FIG. 12 and FIG. 13.

[0322] With the exception of 812T, the Tm of the various HSA fusion molecules ranged from 62-66° C., (FIG. 14). In general, Tm tended towards being higher with the orientation of scFv6475 at the N-terminus of the HSA and scFv8168 at the C-terminus of the HSA, as was shown in 802T, 804T, 808T where Tm of 66° C., 65.5° C. and 66° C., respectively were observed. For the opposite orientation, as exemplified by 801T and 803T, recorded Tm was 62° C. and 63° C., respectively.

[0323] The aggregation propensity was evaluated by analytical SEC. As shown in FIG. 15A, when stored at 4° C. for two weeks, the monomeric fraction of 802T was 98%, while for 801T it was 93%. Upon one freeze and thaw, the monomeric fraction of 802T only dropped slightly to 97%, while for 801T, the monomeric fraction dropped to 91% (FIG. 15B). After multiple freeze-thaw's (up to 4 times), the monomeric fraction of 802T remained at 99% (n=1). In general, minimal changes in aggregation were observed across several HSA-fusion molecules following multiple freeze-thaw cycles (see FIG. 16), indicating that in general these molecules are stable proteins in terms of aggregation propensity. It was also interesting to note that consistent with the trend in Tm described above, both 802T and 804T showed less aggregation than their sibling molecules, 801T and 803T.

[0324] At a concentration of around 2 mg/ml, the monomeric fraction of 802TF was recorded at 97.7%, and 801TF was at 96.6%. When concentrated to around 5 mg/ml, 802TF was recorded at 95.6%, and 801TF at 90.8%. The result was consistent with the general trend of aggregation caused by concentration.

### Example 9

### Assessment of Binding Activity of HSA Fusion Molecules by ELISA

### Materials and Methods

[0325] Binding EC₅₀ of the various fusion proteins (see FIG. 9) against LRP6 protein was measured by ELISA. In general, Maxisorp plates were coated with 2.5 μg/ml LRP6 antigen (see below for details) at 4° C. overnight. The plate was blocked with 50 μl of 2% BSA for 1 h, and washed five times with the wash solution (PBS with 0.05% (v/v) Tween-20). The samples were diluted with 1% BSA accordingly. The plate was incubated at room temperature for 1 h, and washed for 3 times. Detection was done by adding 50 μl pentaHis-HRP (Qiagen Mat. No. 1014992) at 1:2000 dilution in 1% BSA, incubated at room temperature for 1 h, and washed 3 times. 50 μl of substrate reagent A plus B (R&D Systems) was added, then incubated for 5-20 min depending on the color. The reaction was stopped by adding 25 μl of the stop solution, followed by reading absorbance at 450 nm using a Biotek EL808 plate reader.

[0326] In order to measure binding of the fusion molecules in a uniform way, all the molecules were biotinylated to be detected by streptavidin-HRP. Monospecific HSA fusion molecules (scFv8168-HSA (809) and scFv6475-HSA (810)) were used as controls. Overall, three antigens were used: LRP6 propeller domain 1-2 (PD1/2, amino acid residues 19-629 of Accession No. NP002327), LRP6 propeller domain 3-4 (PD3/4, amino acid residues 631-1246 of Accession No. NP002327 and LRP6 propeller domain 1-4-Fc (PD 1-4, LRP6-Fc; R&D Systems, catalog No: 1505-LR).

### Competition ELISA

[0327] To determine the ability of the biparatopic constructs to bind multiple domains of LRP6, competition ELISAs were performed. For example, to determine if binding to LRP6 propeller domain 1-2 (PD1/2) precluded binding to other LRP6 propeller domains, a Maxisorp plate was coated with PD1/2 at 5 μg/ml at 4° C. overnight. The plate was blocked with 50 μl of 2% BSA for 1 h, and washed five times with the wash solution (PBS with 0.05% (v/v) Tween-20). Biotinylated HSA fusion molecule 802T at 2 nM in 1% BSA were mixed with buffer or different antigens (PD1/2, PD3/4 or LRP6-Fc) at 100 nM in solution. The mixture was incubated for 30 min at room temperature prior to adding to the assay plate. The plate was further incubated at room temperature for 1 h, prior to being washed 3 times with PBS containing 0.05% (v/v) Tween-20. Detection was performed as follows: 50 μl of Streptavidin-HRP (R&D Systems, Cat #890803) at 1:200 dilution in 1% BSA was added and the plate was incubated at room temperature for 1 h, prior to being washed 3 times with PBS containing 0.05% (v/v) Tween-20. 50 μl of substrate reagent A plus B (R&D Systems, Cat #DY999) was added, then incubated for 5-20 min depending on the color. The reaction was stopped by adding 25 μl of the stop solution (R&D systems, cat #DY994), followed by reading absorbance at 450 nm using a Biotek EL808 plate reader.

[0328] Both scFv8168 or scFv6475 were used as controls. Similar competition ELISAs were performed using assay plates coated with LRP6 PD3/4 and LRP6 propeller domain 1-4-Fc (PD1-4, LRP6-Fc; R&D Systems, catalog No: 1505-LR).

### Results and Discussion

### Binding Assessment by ELISA

[0329] ELISA binding of several HSA fusion molecules (see FIG. 9 for details) was evaluated and data is shown in FIG. 17. As shown in FIGS. 17A and 17B, 8168-HSA (809) binds PD1/2 with an EC50 of 0.54 nM, whilst binding to PD3/4 is much weaker (EC50: >75 nM). In contrast, scFv 6475-HSA (810) binds to PD3/4 with an EC50 of 0.46 nM, and to PD1/2 with an EC50 of >158 nM. This indicates that scFv8168 and scFv6475 bind differentially to LRP6 PD1/2 and PD3/4, respectively. The binding of various fusion molecules to LRP6-Fc was also compared and results are shown in FIG. 17C. In addition, 812T-HSA was tested for ELISA binding and, as shown in FIG. 17D, binding EC50 estimates appear similar to that of 802T. Furthermore, the binding of 802TF to human LRP6 was also evaluated and the results are presented in FIG. 17E. 802TF also showed similar binding to mouse and cynomolgus monkey LRP6 when evaluated by ELISA.

### Competition ELISA

[0330] To determine if the biparatopic molecules can bind to the target and occupy the two different paratopes in LRP6 full molecule, competition ELISA assays were performed. Firstly, binding and competition was assessed for either antigen PD1/2 or antigen PD3/4. As shown in FIG. 18A either PD1/2 or PD3/4 was coated on the plate surface. Subsequently, 802T at 2 nM was mixed in solution with PD1/2, PD3/4, or LRP6-Fc at 100 nM, and then applied to the wells. The results show that PD1/2 in solution can compete the binding of 802T to PD1/2 coated on the surface, but PD3/4 cannot. In contrast, soluble PD3/4 can compete with 802T for binding binding towards plate bound PD3/4 but not plate bound PD1/2. As expected, LRP6 PD1-4 (LRP6 in FIG. 18A) in solution can compete with 802T for binding towards both PD1/2 and PD3/4 antigens coated on the surface.

[0331] Further experiments were performed in which LRP6 PD1-4 of LRP6-Fc (R&D Systems, catalog No: 1505-LR) were immobilized on the ELISA plate (FIG. 18B). In these studies, neither PD1/2 nor PD3/4 at 100 nM in solution were able to fully compete with 802T for binding to immobilized LRP6. However LRP6 in solution was able to compete with the binding. These results suggest that binding of 802T onto LRP6 can likely occupy the two paratopes simultaneously.

### Example 10

### Assessment of In Vitro Functional Activity of HSA Fusion Molecules in Wnt Ligand Driven Reporter Gene Assays

[0332] The HSA fusion molecules described in FIG. 9 were evaluated for their ability to inhibit both Wnt1 and Wnt3a-stimulated reporter gene activity using the same methodologies as described in example 4 above.

[0333] 801, 801T, 802 and 802T were tested using the transiently transfected cell format and all were found to be potent inhibitors of both Wnt1 and Wnt3a-mediated signaling (FIG. 19A). Additional molecules were also evaluated using this assay format (FIG. 19B and FIG. 19C) and the data generated demonstrate that alteration of the linker and presence/absence of the His tag does not affect the potency of the anti-LRP6 HSA-fusion molecules. Similar data were obtained when the various anti-LRP6 HSA-fusion molecules were tested using the co-culture format (not shown). The potency of 812T, in which the 2 scFv moieties are fused in tandem and 812T-HSA, in which the 2 scFv moieties are fused in tandem followed by fusion to HSA, was found to be similar to that of 802T (FIG. 19D). These results are consistent with the binding ELISA data reported in example 9 and suggest that the anti-LRP6 scFv's can retain potency in several orientations and with the HSA fusion at different positions. Versions of 801T and 802T devoid of both the His tag and any linkers were also generated—when tested in the reporter gene assays, potency was found to be similar to 802T for 801TF and an increase in potency was observed for 802TF (FIG. 19E).

[0334] In addition to HEK293 cells, the activity of 801T and 802T to inhibit Wnt1 and Wnt3a-induced Wnt signaling in MDA-MB435 melanoma cells was determined. In these studies, MDA-MB435 cells stably infected with STF reporter were stimulated with Wnt1 and Wnt3a in the co-culture format. Lentivirus of the STF reporter was packaged in HEK293T cells and viral supernatant used to infect MDA-MB435 cells. A pool of stably selected clones were used for reporter gene co-culture assays as described in Example 4 above. In addition to HEK293 cells, both 801T and 802T were potent inhibitors of Wnt signaling in MDA-MB435 cells (FIG. 20). This data further suggests that the ability of the anti-LRP6 HSA fusion molecules to inhibit Wnt signaling is not limited to HEK293 cells and that these molecules have the potential to inhibit Wnt signaling in a broad range of settings.

### Example 11

### Evaluation of Pharmacokinetic and Pharmacodynamic Properties of Anti-LRP6 Serum Albumin Constructs In Vivo

[0335] The pharmacokinetic (PK) and pharmacodynamic (PD) properties of several of the anti-LRP6 HSA constructs was evaluated in both MMTV-Wnt1 tumor bearing mice and non-tumor bearing rats. (DeAlmeida et al., (2007) Cancer Res. 67, 5371-5379); Ettenberg et al., (2010) Proc. Nat. Acad. Sci. 107, 15473-15478; International Serial No. PCT/EP2008/064821 filed Oct. 31, 2008; PCT/EP2011/057200, filed May 6, 2011; and PCT/EP2011/057202, filed May 6, 2011, the contents of which are incorporated herein by reference in their entirety)

[0336] To determine the PK properties of 802T, 802T no linker and 802T no his tag, MMTV-Wnt1 tumor bearing nude mice were dosed i.v. with a single dose of 5 mg/kg of the above molecules. Serum concentrations of the HSA constructs were determined by mass spectrometry using the methodology described in example 5 at multiple time points after completion of the infusion (0.5, 2, 8, 24, and 48 h, respectively) and results are shown in FIG. 21A. The PK properties of all the molecules was similar, with a half-life of around 14 h. In addition, samples were taken for the analysis of Wnt signaling inhibition at the 7, 24 and 48 h time points. In these samples, the level of mRNA expression of the β-catenin target gene Axin2 was analyzed and results are shown in FIG. 21B. Consistent with data obtained with the anti-LRP6 Fab MSA constructs described in example 5 above and with other anti-LRP6 targeting agents, decreases in Axin2 mRNA expression were observed, the magnitude of which was dependent upon the serum concentration of the anti-LRP6 HSA molecules Ettenberg et al., (2010) Proc. Nat. Acad. Sci. 107, 15473-15478; International Serial No. PCT/EP2008/064821 filed Oct. 31, 2008; PCT/EP2011/057200, filed May 6, 2011; and PCT/EP2011/057202, filed May 6, 2011, the contents of which are incorporated herein by reference in their entirety). Consistent with the PK data, all 3 molecules (802T, 802T no linker and 802T no his tag) exhibited similar changes in Axin2 mRNA levels (FIG. 21B).

[0337] To evaluate the PK properties of 801T, 802T and 802T no his tag, naive Sprague-Dawley rats were dosed IV with a single dose of 5 mg/kg of the above molecules. Serum concentrations of the HSA constructs were determined by mass spectrometry as described in example 5 at multiple time points after completion of the infusion (1, 6, 24, 48, 72, 96 and 192 h, respectively) and results for 802T are shown in FIG. 22. Note that no values are reported for the 96 and 192 h time points as they were below the limit of detection of the assay.

[0338] The PK properties of 802TF in MMTV-Wnt1-tumor bearing nude mice were also evaluated. In these studies, MMTV-Wnt1 tumor bearing nude mice were dosed i.v. with a single dose of 6 or 24 mg/kg of 802TF and serum concentrations were determined by mass spectrometry using the methodology described in example 5 at multiple time points after completion of the infusion (1, 2, 8, 24, 48 and 72 h, respectively). The terminal half-life was found to range from 18 h following the 6 mg/kg dose to 24 h following the 24 mg/kg dose.

### Example 12

### Evaluation of In Vivo Anti-Tumor Efficacy of Anti-LRP6 Serum Albumin Constructs in MMTV-Wnt1 Allograft Model

[0339] Anti-tumor activity of anti-LRP6 Propeller 1+3 scFv6475 (VH: M95F)-HSA-scFv8168 (VH: S34M and S49A) 802T was evaluated in the MMTV-Wnt1 allograft model. MMTV-Wnt1 tumor fragments were implanted subcutaneously (SC) into female nude mice. 23 days after implantation, mice carrying MMTV-Wnt1 tumors (n=5, average 185 mm³; range: 115-265 mm³) were treated with vehicle (PBS, intravenously (IV), weekly (qw) or LRP6-Propeller 1+3 802T (at 2, 4, 6, and 8 mg/kg, iv, three times a week (3 qw) and tumors callipered twice per week (FIG. 23A). 802T demonstrated dose dependent antitumor activity reaching T/C of 10% at 8 mg/kg 3 qw (p<0.05 vs. vehicle). In addition, the effect of the various doses of 802T on Wnt-signaling in the MMTV-Wnt1 tumors was evaluated at the end of the study. Tumors were collected 7 h after the last dose and mRNA expression of the β-catenin target gene Axin2 was evaluated. As shown in FIG. 23B, consistent with the anti-tumor effect, decreases in Axin2 mRNA expression were observed.

[0340] In additional studies, the anti-tumor activity of 802T was evaluated relative to anti-LRP6 MOR08168-Fab-MSA in the MMTV-Wnt1 allograft model. MMTV-Wnt1 tumor fragments were implanted subcutaneously (SC) into female nude mice. 23 days after implantation, mice carrying MMTV-Wnt1 tumors (n=6, average 236 mm³; range: 124-402 mm³) were treated with vehicle (PBS, intravenously (IV), weekly (qw), 802T (6, 12, and 24 mg/kg, IV, three times a week (3 qw), and LRP6 propeller 1 8168-Fab-MSA (6 mg/kg, IV, 3 qw) and tumors callipered twice per week (FIG. 24A). 802T demonstrated dose-dependent antitumor activity reaching T/C of 8% when dosed at 6 mg/kg 3 qw and 44% and 98% regression when dosed at 12 mg/kg and 24 mg/kg 3 qw, respectively (both p<0.05 vs. vehicle). LRP6-Propeller 1 8168-Fab-MSA dosed at 6 mg/kg 3 qw resulted in 94% regression (p<0.05 vs. vehicle). As described above, the effect of the various doses of 802T and anti-LRP6 MOR08168 Fab-MSA on Wnt-signaling in the MMTV-Wnt1 tumors was evaluated at the end of the study. Tumors were collected 7 h after the last dose and mRNA expression of the β-catenin target gene Axin2 was evaluated. As shown in FIG. 24B, consistent with the anti-tumor effect of the molecules, decreases in Axin2 mRNA expression were observed.

[0341] Anti-tumor activity of 802TF was evaluated in the MMTV-Wnt1 allograft model. MMTV-Wnt1 tumor fragments were implanted subcutaneously (SC) into female nude mice. 26 days after implantation, mice carrying MMTV-Wnt1 tumors (n=6, average 204 mm³; range: 127-384 mm³) were treated with vehicle (PBS, intravenously (IV), weekly (qw), 802TF (at 6, 12, and 24 mg/kg, IV, three times a week (3 qw), and anti-LRP6 MOR08168-Fab-MSA (6 mg/kg, IV, 3 qw) and tumors callipered twice per week (FIG. 24C). 802TF demonstrated dose dependent antitumor activity reaching ˜45% regression at day 35 when dosed at 12 or 24 mg/kg 3 qw (p<0.05 vs. vehicle). As described above, the effect of the various doses of 802TF and anti-LRP6 MOR08168 Fab-MSA on Wnt-signaling in the MMTV-Wnt1 tumors was evaluated at the end of the study. Tumors were collected 3 and 7 h after the last dose and mRNA expression of the β-catenin target gene Axin2 was evaluated.

### Example 13

### Generation and Binding Properties of Anti-LRP6 Biparatopic Fc Based Fusion Molecules

[0342] In addition to HSA-fusions, Fc based biparatopic molecules were also generated. In these molecules, the thermostability enhanced mutants of scFv 8168 or scFv6475 were fused to the N-terminal of CH2 or C-terminal of CH3 to make scFv-Fc-scFv fusions as shown in FIG. 25 and FIG. 26 to generate 911T (SEQ ID NO: 297) and 912T (SEQ ID NO: 299), respectively.

[0343] The molecules were produced, purified and characterized using the methods previously described in example 8 of this patent. They were well expressed and gel purity is shown in FIG. 27. In addition, both 911T and 912T were evaluated by analytical SEC and data are presented in FIG. 28 and FIG. 29, respectively. The Tm of 911T are 53.5° C., 60° C. and the Tm of 912T are 52.5° C. and 62° C. by DSF.

[0344] Binding EC50 of both 911T and 912T was determined by ELISA using the same methodology as described in example 10 of this patent. Results are presented in FIG. 30: the binding EC50 for 911T to LRP6-Fc (R&D Systems, catalog No: 1505-LR) was 0.084 nM, and the EC50 of 912T was 0.113 nM. These were all lower than the EC50 of 802T at 0.276 nM, likely reflecting the tetravalency of the Fc-fusion molecules.

### Example 14

### Assessment of In Vitro Functional Activity of Anti-LRP6 Biparatopic Fc Based Fusion Molecules

[0345] The anti-LRP6 biparatopic Fc based fusion molecules described in FIG. 25 were evaluated for their ability to inhibit both Wnt1 and Wnt3a-stimulated reporter gene activity using the same methodologies as described in example 4 above.

[0346] 911T and 912T were tested using the transiently transfected cell format and all were found to be potent inhibitors of both Wnt1 and Wnt3a-mediated signaling (FIG. 31). In addition, all the molecules were found to be at least as potent as 802T, suggesting that the anti-LRP6 scFv moieties can retain their potency when fused to multiple half-life extending proteins.

We claim:

1. An isolated low density lipoprotein-related protein 6 (LRP6) construct comprising first and second LRP6 single chain Fv molecules (scFvs) that bind to LRP6, and a human serum albumin, wherein the first and second scFv molecules are linked to the N- and C-termini of the human serum albumin, wherein the LRP6 construct inhibits a canonical Wnt signal transduction pathway, and wherein the LRP6 construct displays no significant potentiation of a Wnt signal in the presence of an LRP6 binding protein.

2. The isolated construct of claim 1, wherein the first LRP6 scFv is linked to the N-terminal of the human serum albumin and binds to the Propeller 1 region of LRP6, and the second LRP6 scFv is linked to the C-terminal of the human serum albumin and binds to the Propeller 3 region of LRP6.

3. The isolated construct of claim 1, wherein the first LRP6 scFv is linked to the C-terminal of the human serum albumin and binds to the Propeller 1 region of LRP6, and the second LRP6 scFv is linked to the N-terminal of the human serum albumin and binds to the Propeller 3 region of LRP6.

4. The isolated construct of claim 1, wherein the LRP6 binding protein is a Wnt binding protein selected from the group consisting of Wnt 1, Wnt 3, and Wnt 3a.

5. The isolated construct of claim 1, wherein the first and second LRP6 scFvs are indirectly linked to the N- and C-termini of the human serum albumin via an attachment linker selected from the group consisting of an Fc linker, a hinge linker, a Gly-Ser linker, an Ala linker, and a KTHT linker

6. The isolated construct of claim 1, wherein the first and second LRP6 scFvs are directly linked to the N- and C-termini of the human serum albumin by direct fusion to the human serum albumin.

7. The isolated construct of claim 1, wherein the human serum albumin is selected from the group consisting of a mutant human serum albumin, or a fragment of a human serum albumin.

8. The isolated construct of claim 7, wherein the mutant human serum albumin comprises mutations C34S and N503Q.

9. The isolated construct of claim 7, wherein the fragment of human serum albumin comprises at least one domain of human serum albumin selected from the group consisting of DI, DII, DIII, and DIV.

10. The isolated construct of claim 1, wherein the scFv fragment comprises at least one amino acid mutation that improves stability of the scFv compared with the unmutated scFv fragment, wherein the amino acid mutation is selected from FIGS. 32-35.

11. The isolated construct of claim 10, wherein the scFv fragment binds to the Propeller 1 region of LRP6 and comprises at least one amino acid mutation that improves stability of the scFv compared with the unmutated scFv fragment, wherein the amino acid mutation is in a selected from the group consisting of S34M, and S49A.

12. The isolated construct of claim 10, wherein the scFv fragment binds to the Propeller 3 region of LRP6 and comprises at least one amino acid mutation that improves stability of the scFv compared with the unmutated scFv fragment, wherein the amino acid mutation is M95F.

13. The isolated construct of claim 10, wherein the scFv fragment binds to the Propeller 1 region of LRP6 and comprises at least one amino acid mutation that improves stability of the scFv compared with the unmutated scFv fragment, wherein the amino acid mutation is in a selected from the group consisting of S34M, and S49A; and an scFv fragment that binds to the Propeller 3 region of LRP6 and comprises at least one amino acid mutation that improves stability of the scFv compared with the unmutated scFv fragment, wherein the amino acid mutation is M95F.

14. The isolated construct of claim 1, wherein the construct inhibits phosphorylation of LRP6 as assessed by a Wnt ligand induced phosphorylation assay.

15. The isolated construct of claim 1, wherein the construct has the functional activity of depleting a cell population, inhibiting or reducing proliferation of a cell population, inhibiting or reducing secretion of inflammatory mediators from a cell population, inhibiting or reducing secretion of cytoplasmic granules from a cell population, wherein the cell population is selected from the group consisting of tumor cells, and Wnt dependent cells as determined by an assay selected from the group consisting.

16. The isolated construct of claim 1, wherein the construct shows increased half-life of about 5 hours compared with the LRP6 binding moiety without a half-life extender.

17. The isolated low density lipoprotein-related protein 6 (LRP6) construct of claim 1 comprising SEQ ID NO 293: or an amino acid sequence comprising at least 95% sequence identity with SEQ ID NO: 293.

18. The isolated low density lipoprotein-related protein 6 (LRP6) construct of claim 1 comprising SEQ ID NO: 295 or an amino acid sequence comprising at least 95% sequence identity with SEQ ID NO: 295.

19. A nucleic acid comprising a nucleotide sequence encoding a low density lipoprotein-related protein 6 (LRP6) construct of claim 1.

20. The nucleic acid of claim 19 comprising a nucleotide sequence encoding a low density lipoprotein-related protein 6 (LRP6) construct comprising a SEQ ID NO: 293 or a nucleotide sequence comprising at least 98% sequence identity with SEQ ID NO: 293.

21. The nucleic acid of claim 19 comprising a nucleotide sequence encoding a low density lipoprotein-related protein 6 (LRP6) construct comprising a SEQ ID NO: 295 or a nucleotide sequence comprising at least 98% sequence identity with SEQ ID NO: 295.

22. A vector comprising the nucleic acid of claims 19.

23. A pharmaceutical composition comprising a low density lipoprotein-related protein 6 (LRP6) construct of claim 1 and a pharmaceutically acceptable carrier.

24. A method of making a low density lipoprotein-related protein 6 (LRP6) construct comprising: (a) providing a first single chain Fv molecule that binds to a first binding site of an LRP6 target receptor; (b) providing a second single chain Fv molecule that binds to a second binding site of an LRP6 target receptor; and (c) directly or indirectly linking the first scFv and the second scFv to a half-life extender molecule, wherein the LRP6 construct inhibits a canonical Wnt signal transduction pathway, and wherein the LRP6 construct displays no significant potentiation of a Wnt signal in the presence of an LRP6 binding protein.

25. A method of treating a disease mediated by a canonical Wnt signaling pathway using a low density lipoprotein-related protein 6 (LRP6) construct.

28. A method of treating a cancer comprising selecting a subject having an LRP6 expressing cancer, administering to a subject in need thereof an effective amount of a composition comprising a low density lipoprotein-related protein 6 (LRP6) construct, wherein the cancer is selected from the group consisting of breast cancer, lung cancer, multiple myeloma, ovarian cancer, liver cancer, liver cancer gastric cancer, prostate cancer, acute myeloid leukemia, chronic myeloid leukemia, osteosarcoma, squamous cell carcinoma, and melanoma.

The application's sequence listing, which the Patent Office published only in electronic form, follows.

SEQUENCE LISTING (336 sequences)

SEQ ID NO: 1 - protein, 5 aa, Homo Sapien
DYVIN

SEQ ID NO: 2 - protein, 17 aa, Homo Sapien
GISWSGVNTHYADSVKG

SEQ ID NO: 3 - protein, 15 aa, Homo Sapien
LGATANNIRYKFMDV

SEQ ID NO: 4 - protein, 10 aa, Homo Sapien
SGDSLRNKVY

SEQ ID NO: 5 - protein, 6 aa, Homo Sapien
KNNRPS

SEQ ID NO: 6 - protein, 7 aa, Homo Sapien
GFTFSDY

SEQ ID NO: 7 - protein, 6 aa, Homo Sapien
SWSGVN

SEQ ID NO: 8 - protein, 15 aa, Homo Sapien
LGATANNIRYKFMDV

SEQ ID NO: 9 - protein, 6 aa, Homo Sapien
DSLRNK

SEQ ID NO: 10 - protein, 2 aa, Homo Sapien
KN

SEQ ID NO: 11 - protein, 7 aa, Homo Sapien
YDGQKSL

SEQ ID NO: 12 - protein, 105 aa, Homo Sapien
DIELTQPPSVSVAPGQTARISCSGDSLRNKVYWYQQKPGQAPVLVIYKNNRPSGIPERFSGSNSGNTATLTISGTQAEDEADYYCQSYDGQKSLVFGGGTKLTVL

SEQ ID NO: 13 - protein, 124 aa, Homo Sapien
QVQLVESGGGLVQPGGSLRLSCAASGFTFSDYVINWVRQAPGKGLEWVSGISWSGVNTHYADSVKGRFTISRDNSKNTLYLQMNSLRAEDTAVYYCARLGATANNIRYKFMDVWGQGTLVTVSS

SEQ ID NO: 14 - DNA, 315 bp, Homo Sapien
gatatcgaactgacccagccgccttcagtgagcgttgcaccaggtcagaccgcgcgtatctcgtgtagcggcgattctcttcgtaataaggtttattggtaccagcagaaacccgggcaggcgccagttcttgtgatttataagaataatcgtccctcaggcatcccggaacgctttagcggatccaacagcggcaacaccgcgaccctgaccattagcggcactcaggcggaagacgaagcggattattattgccagtcttatgatggtcagaagtctcttgtgtttggcggcggcacgaagttaaccgtccta

SEQ ID NO: 15 - DNA, 372 bp, Homo Sapien
caggtgcaattggtggaaagcggcggcggcctggtgcaaccgggcggcagcctgcgtctgagctgcgcggcctccggatttaccttttctgattatgttattaattgggtgcgccaagcccctgggaagggtctcgagtgggtgagcggtatttcttggtctggtgttaatactcattatgctgattctgttaagggtcgttttaccatttcacgtgataattcgaaaaacaccctgtatctgcaaatgaacagcctgcgtgcggaagatacggccgtgtattattgcgcgcgtcttggtgctactgctaataatattcgttataagtttatggatgtttggggccaaggcaccctggtgacggttagctca

SEQ ID NO: 16 - protein, 211 aa, Homo Sapien
DIELTQPPSVSVAPGQTARISCSGDSLRNKVYWYQQKPGQAPVLVIYKNNRPSGIPERFSGSNSGNTATLTISGTQAEDEADYYCQSYDGQKSLVFGGGTKLTVLGQPKAAPSVTLFPPSSEELQANKATLVCLISDFYPGAVTVAWKADSSPVKAGVETTTPSKQSNNKYAASSYLSLTPEQWKSHRSYSCQVTHEGSTVEKTVAPTECS

SEQ ID NO: 17 - protein, 454 aa, Homo Sapien
QVQLVESGGGLVQPGGSLRLSCAASGFTFSDYVINWVRQAPGKGLEWVSGISWSGVNTHYADSVKGRFTISRDNSKNTLYLQMNSLRAEDTAVYYCARLGATANNIRYKFMDVWGQGTLVTVSSASTKGPSVFPLAPSSKSTSGGTAALGCLVKDYFPEPVTVSWNSGALTSGVHTFPAVLQSSGLYSLSSVVTVPSSSLGTQTYICNVNHKPSNTKVDKRVEPKSCDKTHTCPPCPAPEAAGGPSVFLFPPKPKDTLMISRTPEVTCVVVDVSHEDPEVKFNWYVDGVEVHNAKTKPREEQYNSTYRVVSVLTVLHQDWLNGKEYKCKVSNKALPAPIEKTISKAKGQPREPQVYTLPPSREEMTKNQVSLTCLVKGFYPSDIAVEWESNGQPENNYKTTPPVLDSDGSFFLYSKLTVDKSRWQQGNVFSCSVMHEALHNHYTQKSLSLSPGK

SEQ ID NO: 18 - DNA, 633 bp, Homo Sapien
gatatcgaactgacccagccgccttcagtgagcgttgcaccaggtcagaccgcgcgtatctcgtgtagcggcgattctcttcgtaataaggtttattggtaccagcagaaacccgggcaggcgccagttcttgtgatttataagaataatcgtccctcaggcatcccggaacgctttagcggatccaacagcggcaacaccgcgaccctgaccattagcggcactcaggcggaagacgaagcggattattattgccagtcttatgatggtcagaagtctcttgtgtttggcggcggcacgaagttaaccgtcctaggtcagcccaaggctgccccctcggtcactctgttcccgccctcctctgaggagcttcaagccaacaaggccacactggtgtgtctcataagtgacttctacccgggagccgtgacagtggcctggaaggcagatagcagccccgtcaaggcgggagtggagaccaccacaccctccaaacaaagcaacaacaagtacgcggccagcagctatctgagcctgacgcctgagcagtggaagtcccacagaagctacagctgccaggtcacgcatgaagggagcaccgtggagaagacagtggcccctacagaatgttca

SEQ ID NO: 19 - DNA, 1362 bp, Homo Sapien
caggtgcaattggtggaaagcggcggcggcctggtgcaaccgggcggcagcctgcgtctgagctgcgcggcctccggatttaccttttctgattatgttattaattgggtgcgccaagcccctgggaagggtctcgagtgggtgagcggtatttcttggtctggtgttaatactcattatgctgattctgttaagggtcgttttaccatttcacgtgataattcgaaaaacaccctgtatctgcaaatgaacagcctgcgtgcggaagatacggccgtgtattattgcgcgcgtcttggtgctactgctaataatattcgttataagtttatggatgtttggggccaaggcaccctggtgacggttagctcagcctccaccaagggtccatcggtcttccccctggcaccctcctccaagagcacctctgggggcacagcggccctgggctgcctggtcaaggactacttccccgaaccggtgacggtgtcgtggaactcaggcgccctgaccagcggcgtgcacaccttcccggctgtcctacagtcctcaggactctactccctcagcagcgtggtgaccgtgccctccagcagcttgggcacccagacctacatctgcaacgtgaatcacaagcccagcaacaccaaggtggacaagagagttgagcccaaatcttgtgacaaaactcacacatgcccaccgtgcccagcacctgaagcagcggggggaccgtcagtcttcctcttccccccaaaacccaaggacaccctcatgatctcccggacccctgaggtcacatgcgtggtggtggacgtgagccacgaagaccctgaggtcaagttcaactggtacgtggacggcgtggaggtgcataatgccaagacaaagccgcgggaggagcagtacaacagcacgtaccgggtggtcagcgtcctcaccgtcctgcaccaggactggctgaatggcaaggagtacaagtgcaaggtctccaacaaagccctcccagcccccatcgagaaaaccatctccaaagccaaagggcagccccgagaaccacaggtgtacaccctgcccccatcccgggaggagatgaccaagaaccaggtcagcctgacctgcctggtcaaaggcttctatcccagcgacatcgccgtggagtgggagagcaatgggcagccggagaacaactacaagaccacgcctcccgtgctggactccgacggctccttcttcctctacagcaagctcaccgtggacaagagcaggtggcagcaggggaacgtcttctcatgctccgtgatgcatgaggctctgcacaaccactacacgcagaagagcctctccctgtctccgggtaaa

SEQ ID NO: 20 - protein, 5 aa, Homo Sapien
VNGMH

SEQ ID NO: 21 - protein, 16 aa, Homo Sapien
VIDGMGHTYYADSVKG

SEQ ID NO: 22 - protein, 11 aa, Homo Sapien
YDYIKYGAFDP

SEQ ID NO: 23 - protein, 11 aa, Homo Sapien
SGDNIGSKYVH

SEQ ID NO: 24 - protein, 7 aa, Homo Sapien
GDSNRPS

SEQ ID NO: 25 - protein, 10 aa, Homo Sapien
TRTSTPISGV

SEQ ID NO: 26 - protein, 7 aa, Homo Sapien
GFTFSVN

SEQ ID NO: 27 - protein, 5 aa, Homo Sapien
DGMGH

SEQ ID NO: 28 - protein, 11 aa, Homo Sapien
YDYIKYGAFDP

SEQ ID NO: 29 - protein, 7 aa, Homo Sapien
DNIGSKY

SEQ ID NO: 30 - protein, 3 aa, Homo Sapien
GDS

SEQ ID NO: 31 - protein, 7 aa, Homo Sapien
TSTPISG

SEQ ID NO: 32 - protein, 107 aa, Homo Sapien
DIELTQPPSVSVAPGQTARISCSGDNIGSKYVHWYQQKPGQAPVLVIYGDSNRPSGIPERFSGSNSGNTATLTISGTQAEDEADYYCTRTSTPISGVFGGGTKLTVL

SEQ ID NO: 33 - protein, 119 aa, Homo Sapien
QVQLVESGGGLVQPGGSLRLSCAASGFTFSVNGMHWVRQAPGKGLEWVSVIDGMGHTYYADSVKGRFTISRDNSKNTLYLQMNSLRAEDTAVYYCARYDYIKYGAFDPWGQGTLVTVSS

SEQ ID NO: 34 - protein, 107 aa, Homo Sapien
SYELTQPPSVSVSPGQTASITCSGDNIGSKYVHWYQQKPGQSPVLVIYGDSNRPSGIPERFSGSNSGNTATLTISGTQAMDEADYYCTRTSTPISGVFGGGTKLTVL

SEQ ID NO: 35 - protein, 119 aa, Homo Sapien
EVQLVESGGGLVQPGGSLRLSCAASGFTFSVNGMHWVRQAPGKGLEWVSVIDGMGHTYYADSVKGRFTISRDNSKNTLYLQMNSLRAEDTAVYYCARYDYIKYGAFDPWGQGTLVTVSS

SEQ ID NO: 36 - DNA, 321 bp, Homo Sapien
gatatcgaactgacccagccgccttcagtgagcgttgcaccaggtcagaccgcgcgtatctcgtgtagcggcgataatattggttctaagtatgttcattggtaccagcagaaacccgggcaggcgccagttcttgtgatttatggtgattctaatcgtccctcaggcatcccggaacgctttagcggatccaacagcggcaacaccgcgaccctgaccattagcggcactcaggcggaagacgaagcggattattattgcactcgtacttctactcctatttctggtgtgtttggcggcggcacgaagttaaccgttctt

SEQ ID NO: 37 - DNA, 357 bp, Homo Sapien
caggtgcaattggtggaaagcggcggcggcctggtgcaaccgggcggcagcctgcgtctgagctgcgcggcctccggatttaccttttctgttaatggtatgcattgggtgcgccaagcccctgggaagggtctcgagtgggtgagcgttattgatggtatgggtcatacttattatgctgattctgttaagggtcgttttaccatttcacgtgataattcgaaaaacaccctgtatctgcaaatgaacagcctgcgtgcggaagatacggccgtgtattattgcgcgcgttatgattatattaagtatggtgcttttgatccttggggccaaggcaccctggtgacggttagctca

SEQ ID NO: 38 - protein, 212 aa, Homo Sapien
DIELTQPPSVSVAPGQTARISCSGDNIGSKYVHWYQQKPGQAPVLVIYGDSNRPSGIPERFSGSNSGNTATLTISGTQAEDEADYYCTRTSTPISGVFGGGTKLTVLGQPKAAPSVTLFPPSSEELQANKATLVCLISDFYPGAVTVAWKADSSPVKAGVETTTPSKQSNNKYAASSYLSLTPEQWKSHRSYSCQVTHEGSTVEKTVAPTEA

SEQ ID NO: 39 - protein, 221 aa, Homo Sapien
QVQLVESGGGLVQPGGSLRLSCAASGFTFSVNGMHWVRQAPGKGLEWVSVIDGMGHTYYADSVKGRFTISRDNSKNTLYLQMNSLRAEDTAVYYCARYDYIKYGAFDPWGQGTLVTVSSASTKGPSVFPLAPSSKSTSGGTAALGCLVKDYFPEPVTVSWNSGALTSGVHTFPAVLQSSGLYSLSSVVTVPSSSLGTQTYICNVNHKPSNTKVDKKVEPKS

SEQ ID NO: 40 - DNA, 636 bp, Homo Sapien
gatatcgaactgacccagccgccttcagtgagcgttgcaccaggtcagaccgcgcgtatctcgtgtagcggcgataatattggttctaagtatgttcattggtaccagcagaaacccgggcaggcgccagttcttgtgatttatggtgattctaatcgtccctcaggcatcccggaacgctttagcggatccaacagcggcaacaccgcgaccctgaccattagcggcactcaggcggaagacgaagcggattattattgcactcgtacttctactcctatttctggtgtgtttggcggcggcacgaagttaaccgttcttggccagccgaaagccgcaccgagtgtgacgctgtttccgccgagcagcgaagaattgcaggcgaacaaagcgaccctggtgtgcctgattagcgacttttatccgggagccgtgacagtggcctggaaggcagatagcagccccgtcaaggcgggagtggagaccaccacaccctccaaacaaagcaacaacaagtacgcggccagcagctatctgagcctgacgcctgagcagtggaagtcccacagaagctacagctgccaggtcacgcatgaggggagcaccgtggaaaaaaccgttgcgccgactgaggcc

SEQ ID NO: 41 - DNA, 663 bp, Homo Sapien
caggtgcaattggtggaaagcggcggcggcctggtgcaaccgggcggcagcctgcgtctgagctgcgcggcctccggatttaccttttctgttaatggtatgcattgggtgcgccaagcccctgggaagggtctcgagtgggtgagcgttattgatggtatgggtcatacttattatgctgattctgttaagggtcgttttaccatttcacgtgataattcgaaaaacaccctgtatctgcaaatgaacagcctgcgtgcggaagatacggccgtgtattattgcgcgcgttatgattatattaagtatggtgcttttgatccttggggccaaggcaccctggtgacggttagctcagcgtcgaccaaaggtccaagcgtgtttccgctggctccgagcagcaaaagcaccagcggcggcacggctgccctgggctgcctggttaaagattatttcccggaaccagtcaccgtgagctggaacagcggggcgctgaccagcggcgtgcatacctttccggcggtgctgcaaagcagcggcctgtatagcctgagcagcgttgtgaccgtgccgagcagcagcttaggcactcagacctatatttgcaacgtgaaccataaaccgagcaacaccaaagtggataaaaaagtggaaccgaaaagc

SEQ ID NO: 42 - protein, 107 aa, Homo Sapien
SYELTQPLSVSVALGQTARITCGGDNIGSKYVHWYQQKPGQAPVLVIYGDSNRPSGIPERFSGSNSGNTATLTISRAQAGDEADYYCTRTSTPISGVFGGGTKLTVL

SEQ ID NO: 43 - protein, 321 aa, Homo Sapien
AGCTATGAACTGACCCAGCCGCTGTCTGTGAGCGTGGCGCTGGGCCAGACCGCGCGTATTACCTGCGGTGGCGATAACATTGGCAGCAAATATGTGCATTGGTATCAGCAGAAACCGGGCCAGGCGCCGGTGCTGGTGATTTATGGCGATAGCAACCGTCCGAGCGGCATTCCGGAACGTTTTAGCGGCAGCAACAGCGGCAACACCGCGACCCTGACCATTTCTCGCGCGCAGGCGGGTGATGAAGCGGATTATTATTGCACCCGTACCAGCACCCCGATTAGCGGCGTGTTTGGCGGCGGTACGAAGTTAACCGTTCTT

SEQ ID NO: 44 - DNA, 357 bp, Homo Sapien
gaggtgcaattgctggaaagcggcggcggcctggtgcaaccgggcggcagcctgcgtctgagctgcgcggcctccggatttaccttttctgttaatggtatgcattgggtgcgccaagcccctgggaagggtctcgagtgggtgagcgttattgatggtatgggtcatacttattatgctgattctgttaagggtcgttttaccatttcacgtgataattcgaaaaacaccctgtatctgcaaatgaacagcctgcgtgcggaagatacggccgtgtattattgcgcgcgttatgattatattaagtatggtgcttttgatccttggggccaaggcaccctggtgacggttagctca

SEQ ID NO: 45 - protein, 5 aa, Homo Sapien
DYAIH

SEQ ID NO: 46 - protein, 17 aa, Homo Sapien
GISYSGSSTHYADSVKG

SEQ ID NO: 47 - protein, 14 aa, Homo Sapien
GSHGNIMAKRYFDF

SEQ ID NO: 48 - protein, 11 aa, Homo Sapien
SGDNIRKKYVY

SEQ ID NO: 49 - protein, 7 aa, Homo Sapien
EDSKRPS

SEQ ID NO: 50 - protein, 11 aa, Homo Sapien
STADSGINNGV

SEQ ID NO: 51 - protein, 7 aa, Homo Sapien
GFTFSDY

SEQ ID NO: 52 - protein, 6 aa, Homo Sapien
SYSGSS

SEQ ID NO: 53 - protein, 14 aa, Homo Sapien
GSHGNIMAKRYFDF

SEQ ID NO: 54 - protein, 7 aa, Homo Sapien
DNIRKKY

SEQ ID NO: 55 - protein, 3 aa, Homo Sapien
EDS

SEQ ID NO: 56 - protein, 8 aa, Homo Sapien
ADSGINNG

SEQ ID NO: 57 - protein, 108 aa, Homo Sapien
DIELTQPPSVSVAPGQTARISCSGDNIRKKYVYWYQQKPGQAPVLVIYEDSKRPSGIPERFSGSNSGNTATLTISGTQAEDEADYYCSTADSGINNGVFGGGTKLTVL

SEQ ID NO: 58 - protein, 123 aa, Homo Sapien
QVQLVESGGGLVQPGGSLRLSCAASGFTFSDYAIHWVRQAPGKGLEWVSGISYSGSSTHYADSVKGRFTISRDNSKNTLYLQMNSLRAEDTAVYYCARGSHGNIMAKRYFDFWGQGTLVTVSS

SEQ ID NO: 59 - protein, 108 aa, Homo Sapien
SYELTQPPSVSVSPGQTASITCSGDNIRKKYVYWYQQKPGQSPVLVIYEDSKRPSGIPERFSGSNSGNTATLTISGTQAMDEADYYCSTADSGINNGVFGGGTKLTVL

SEQ ID NO: 60 - protein, 123 aa, Homo Sapien
EVQLVESGGGLVQPGGSLRLSCAASGFTFSDYAIHWVRQAPGKGLEWVSGISYSGSSTHYADSVKGRFTISRDNSKNTLYLQMNSLRAEDTAVYYCARGSHGNIMAKRYFDFWGQGTLVTVSS

SEQ ID NO: 61 - DNA, 324 bp, Homo Sapien
gatatcgaactgacccagccgccttcagtgagcgttgcaccaggtcagaccgcgcgtatctcgtgtagcggcgataatattcgtaagaagtatgtttattggtaccagcagaaacccgggcaggcgccagttcttgtgatttatgaggattctaagcgtccctcaggcatcccggaacgctttagcggatccaacagcggcaacaccgcgaccctgaccattagcggcactcaggcggaagacgaagcggattattattgctctactgctgattctggtattaataatggtgtgtttggcggcggcacgaagttaaccgttctt

SEQ ID NO: 62 - DNA, 369 bp, Homo Sapien
caggtgcaattggtggaaagcggcggcggcctggtgcaaccgggcggcagcctgcgtctgagctgcgcggcctccggatttaccttttctgattatgctattcattgggtgcgccaagcccctgggaagggtctcgagtgggtgagcggtatctcttattctggtagctctacccattatgcggatagcgtgaaaggccgttttaccatttcacgtgataattcgaaaaacaccctgtatctgcaaatgaacagcctgcgtgcggaagatacggccgtgtattattgcgcgcgtggttctcatggtaatattatggctaagcgttattttgatttttggggccaaggcaccctggtgacggttagctca

SEQ ID NO: 63 - protein, 214 aa, Homo Sapien
DIELTQPPSVSVAPGQTARISCSGDNIRKKYVYWYQQKPGQAPVLVIYEDSKRPSGIPERFSGSNSGNTATLTISGTQAEDEADYYCSTADSGINNGVFGGGTKLTVLGQPKAAPSVTLFPPSSEELQANKATLVCLISDFYPGAVTVAWKADSSPVKAGVETTTPSKQSNNKYAASSYLSLTPEQWKSHRSYSCQVTHEGSTVEKTVAPTECS

SEQ ID NO: 64 - protein, 453 aa, Homo Sapien
QVQLVESGGGLVQPGGSLRLSCAASGFTFSDYAIHWVRQAPGKGLEWVSGISYSGSSTHYADSVKGRFTISRDNSKNTLYLQMNSLRAEDTAVYYCARGSHGNIMAKRYFDFWGQGTLVTVSSASTKGPSVFPLAPSSKSTSGGTAALGCLVKDYFPEPVTVSWNSGALTSGVHTFPAVLQSSGLYSLSSVVTVPSSSLGTQTYICNVNHKPSNTKVDKRVEPKSCDKTHTCPPCPAPEAAGGPSVFLFPPKPKDTLMISRTPEVTCVVVDVSHEDPEVKFNWYVDGVEVHNAKTKPREEQYNSTYRVVSVLTVLHQDWLNGKEYKCKVSNKALPAPIEKTISKAKGQPREPQVYTLPPSREEMTKNQVSLTCLVKGFYPSDIAVEWESNGQPENNYKTTPPVLDSDGSFFLYSKLTVDKSRWQQGNVFSCSVMHEALHNHYTQKSLSLSPGK

SEQ ID NO: 65 - DNA, 642 bp, Homo Sapien
gatatcgaactgacccagccgccttcagtgagcgttgcaccaggtcagaccgcgcgtatctcgtgtagcggcgataatattcgtaagaagtatgtttattggtaccagcagaaacccgggcaggcgccagttcttgtgatttatgaggattctaagcgtccctcaggcatcccggaacgctttagcggatccaacagcggcaacaccgcgaccctgaccattagcggcactcaggcggaagacgaagcggattattattgctctactgctgattctggtattaataatggtgtgtttggcggcggcacgaagttaaccgtcctaggtcagcccaaggctgccccctcggtcactctgttcccgccctcctctgaggagcttcaagccaacaaggccacactggtgtgtctcataagtgacttctacccgggagccgtgacagtggcctggaaggcagatagcagccccgtcaaggcgggagtggagaccaccacaccctccaaacaaagcaacaacaagtacgcggccagcagctatctgagcctgacgcctgagcagtggaagtcccacagaagctacagctgccaggtcacgcatgaagggagcaccgtggagaagacagtggcccctacagaatgttca

SEQ ID NO: 66 - DNA, 1359 bp, Homo Sapien
caggtgcaattggtggaaagcggcggcggcctggtgcaaccgggcggcagcctgcgtctgagctgcgcggcctccggatttaccttttctgattatgctattcattgggtgcgccaagcccctgggaagggtctcgagtgggtgagcggtatctcttattctggtagctctacccattatgcggatagcgtgaaaggccgttttaccatttcacgtgataattcgaaaaacaccctgtatctgcaaatgaacagcctgcgtgcggaagatacggccgtgtattattgcgcgcgtggttctcatggtaatattatggccaagcgttattttgatttttggggccaaggcaccctggtgacggttagctcagcctccaccaagggtccatcggtcttccccctggcaccctcctccaagagcacctctgggggcacagcggccctgggctgcctggtcaaggactacttccccgaaccggtgacggtgtcgtggaactcaggcgccctgaccagcggcgtgcacaccttcccggctgtcctacagtcctcaggactctactccctcagcagcgtggtgaccgtgccctccagcagcttgggcacccagacctacatctgcaacgtgaatcacaagcccagcaacaccaaggtggacaagagagttgagcccaaatcttgtgacaaaactcacacatgcccaccgtgcccagcacctgaagcagcggggggaccgtcagtcttcctcttccccccaaaacccaaggacaccctcatgatctcccggacccctgaggtcacatgcgtggtggtggacgtgagccacgaagaccctgaggtcaagttcaactggtacgtggacggcgtggaggtgcataatgccaagacaaagccgcgggaggagcagtacaacagcacgtaccgggtggtcagcgtcctcaccgtcctgcaccaggactggctgaatggcaaggagtacaagtgcaaggtctccaacaaagccctcccagcccccatcgagaaaaccatctccaaagccaaagggcagccccgagaaccacaggtgtacaccctgcccccatcccgggaggagatgaccaagaaccaggtcagcctgacctgcctggtcaaaggcttctatcccagcgacatcgccgtggagtgggagagcaatgggcagccggagaacaactacaagaccacgcctcccgtgctggactccgacggctccttcttcctctacagcaagctcaccgtggacaagagcaggtggcagcaggggaacgtcttctcatgctccgtgatgcatgaggctctgcacaaccactacacgcagaagagcctctccctgtctccgggtaaa

SEQ ID NO: 67 - protein, 7 aa, Homo Sapien
NRGGGVG

SEQ ID NO: 68 - protein, 16 aa, Homo Sapien
WIDWDDDKSYSTSLKT

SEQ ID NO: 69 - protein, 9 aa, Homo Sapien
MHLPLVFDS

SEQ ID NO: 70 - protein, 12 aa, Homo Sapien
RASQFIGSRYLA

SEQ ID NO: 71 - protein, 7 aa, Homo Sapien
GASNRAT

SEQ ID NO: 72 - protein, 9 aa, Homo Sapien
QQYYDYPQT

SEQ ID NO: 73 - protein, 9 aa, Homo Sapien
GFSLSNRGG

SEQ ID NO: 74 - protein, 5 aa, Homo Sapien
DWDDD

SEQ ID NO: 75 - protein, 9 aa, Homo Sapien
MHLPLVFDS

SEQ ID NO: 76 - protein, 8 aa, Homo Sapien
SQFIGSRY

SEQ ID NO: 77 - protein, 3 aa, Homo Sapien
GAS

SEQ ID NO: 78 - protein, 6 aa, Homo Sapien
YYDYPQ

SEQ ID NO: 79 - protein, 108 aa, Homo Sapien
DIVLTQSPATLSLSPGERATLSCRASQFIGSRYLAWYQQKPGQAPRLLIYGASNRATGVPARFSGSGSGTDFTLTISSLEPEDFATYYCQQYYDYPQTFGQGTKVEIK

SEQ ID NO: 80 - protein, 119 aa, Homo Sapien
QVQLKESGPALVKPTQTLTLTCTFSGFSLSNRGGGVGWIRQPPGKALEWLAWIDWDDDKSYSTSLKTRLTISKDTSKNQVVLTMTNMDPVDTATYYCARMHLPLVFDSWGQGTLVTVSS

SEQ ID NO: 81 - DNA, 324 bp, Homo Sapien
gatatcgtgctgacccagagcccggcgaccctgagcctgtctccgggcgaacgtgcgaccctgagctgcagagcgagccagtttattggttctcgttatctggcttggtaccagcagaaaccaggtcaagcaccgcgtctattaatttatggtgcttctaatcgtgcaactggggtcccggcgcgttttagcggctctggatccggcacggattttaccctgaccattagcagcctggaacctgaagactttgcgacttattattgccagcagtattatgattatcctcagacctttggccagggtacgaaagttgaaattaaa

SEQ ID NO: 82 - DNA, 357 bp, Homo Sapien
caggtgcaattgaaagaaagcggcccggccctggtgaaaccgacccaaaccctgaccctgacctgtaccttttccggatttagcctgtctaatcgtggtggtggtgtgggttggattcgccagccgcctgggaaagccctcgagtggctggcttggatcgattgggatgatgataagtcttatagcaccagcctgaaaacgcgtctgaccattagcaaagatacttcgaaaaatcaggtggtgctgactatgaccaacatggacccggtggatacggccacctattattgcgcgcgtatgcatcttcctcttgtttttgattcttggggccaaggcaccctggtgacggttagctca

SEQ ID NO: 83 - protein, 215 aa, Homo Sapien
DIVLTQSPATLSLSPGERATLSCRASQFIGSRYLAWYQQKPGQAPRLLIYGASNRATGVPARFSGSGSGTDFTLTISSLEPEDFATYYCQQYYDYPQTFGQGTKVEIKRTVAAPSVFIFPPSDEQLKSGTASVVCLLNNFYPREAKVQWKVDNALQSGNSQESVTEQDSKDSTYSLSSTLTLSKADYEKHKVYACEVTHQGLSSPVTKSFNRGEC

SEQ ID NO: 84 - protein, 449 aa, Homo Sapien
QVQLKESGPALVKPTQTLTLTCTFSGFSLSNRGGGVGWIRQPPGKALEWLAWIDWDDDKSYSTSLKTRLTISKDTSKNQVVLTMTNMDPVDTATYYCARMHLPLVFDSWGQGTLVTVSSASTKGPSVFPLAPSSKSTSGGTAALGCLVKDYFPEPVTVSWNSGALTSGVHTFPAVLQSSGLYSLSSVVTVPSSSLGTQTYICNVNHKPSNTKVDKRVEPKSCDKTHTCPPCPAPEAAGGPSVFLFPPKPKDTLMISRTPEVTCVVVDVSHEDPEVKFNWYVDGVEVHNAKTKPREEQYNSTYRVVSVLTVLHQDWLNGKEYKCKVSNKALPAPIEKTISKAKGQPREPQVYTLPPSREEMTKNQVSLTCLVKGFYPSDIAVEWESNGQPENNYKTTPPVLDSDGSFFLYSKLTVDKSRWQQGNVFSCSVMHEALHNHYTQKSLSLSPGK

SEQ ID NO: 85 - DNA, 645 bp, Homo Sapien
gatatcgtgctgacccagagcccggcgaccctgagcctgtctccgggcgaacgtgcgaccctgagctgcagagcgagccagtttattggttctcgttatctggcttggtaccagcagaaaccaggtcaagcaccgcgtctattaatttatggtgcttctaatcgtgcaactggggtcccggcgcgttttagcggctctggatccggcacggattttaccctgaccattagcagcctggaacctgaagactttgcgacttattattgccagcagtattatgattatcctcagacctttggccagggtacgaaagttgaaattaaacgtacggtggctgcaccatctgtcttcatcttcccgccatctgatgagcagttgaaatctggaactgcctctgttgtgtgcctgctgaataacttctatcccagagaggccaaagtacagtggaaggtggataacgccctccaatcgggtaactcccaggagagtgtcacagagcaggacagcaaggacagcacctacagcctcagcagcaccctgacgctgagcaaagcagactacgagaaacacaaagtctacgcctgcgaagtcacccatcagggcctgagctcgcccgtcacaaagagcttcaacaggggagagtgt

SEQ ID NO: 86 - DNA, 1347 bp, Homo Sapien
caggtgcaattgaaagaaagcggcccggccctggtgaaaccgacccaaaccctgaccctgacctgtaccttttccggatttagcctgtctaatcgtggtggtggtgtgggttggattcgccagccgcctgggaaagccctcgagtggctggcttggatcgattgggatgatgataagtcttatagcaccagcctgaaaacgcgtctgaccattagcaaagatacttcgaaaaatcaggtggtgctgactatgaccaacatggacccggtggatacggccacctattattgcgcgcgtatgcatcttcctcttgtttttgattcttggggccaaggcaccctggtgacggttagctcagcctccaccaagggtccatcggtcttccccctggcaccctcctccaagagcacctctgggggcacagcggccctgggctgcctggtcaaggactacttccccgaaccggtgacggtgtcgtggaactcaggcgccctgaccagcggcgtgcacaccttcccggctgtcctacagtcctcaggactctactccctcagcagcgtggtgaccgtgccctccagcagcttgggcacccagacctacatctgcaacgtgaatcacaagcccagcaacaccaaggtggacaagagagttgagcccaaatcttgtgacaaaactcacacatgcccaccgtgcccagcacctgaagcagcggggggaccgtcagtcttcctcttccccccaaaacccaaggacaccctcatgatctcccggacccctgaggtcacatgcgtggtggtggacgtgagccacgaagaccctgaggtcaagttcaactggtacgtggacggcgtggaggtgcataatgccaagacaaagccgcgggaggagcagtacaacagcacgtaccgggtggtcagcgtcctcaccgtcctgcaccaggactggctgaatggcaaggagtacaagtgcaaggtctccaacaaagccctcccagcccccatcgagaaaaccatctccaaagccaaagggcagccccgagaaccacaggtgtacaccctgcccccatcccgggaggagatgaccaagaaccaggtcagcctgacctgcctggtcaaaggcttctatcccagcgacatcgccgtggagtgggagagcaatgggcagccggagaacaactacaagaccacgcctcccgtgctggactccgacggctccttcttcctctacagcaagctcaccgtggacaagagcaggtggcagcaggggaacgtcttctcatgctccgtgatgcatgaggctctgcacaaccactacacgcagaagagcctctccctgtctccgggtaaa

SEQ ID NO: 87 - protein, 119 aa, Homo Sapien
QVTLKESGPALVKPTQTLTLTCTFSGFSLSNRGGGVGWIRQPPGKALEWLAWIDWDDDKSYSTSLKTRLTISKDTSKNQVVLTMTNMDPVDTATYYCARMHLPLVFDSWGQGTLVTVSS

SEQ ID NO: 88 - protein, 108 aa, Homo Sapien
EIVLTQSPATLSLSPGERATLSCRASQFIGSRYLAWYQQKPGQAPRLLIYGASNRATGIPARFSGSGSGTDFTLTISSLEPEDFAVYYCQQYYDYPQTFGQGTKVEIK

SEQ ID NO: 89 - DNA, 357 bp, Homo Sapien
caggtcacactgaaagagtccggccctgccctggtcaaacccacccagaccctgaccctgacatgcaccttcagcggcttcagcctgagcaacagaggcggcggagtgggctggatcagacagcctcccggcaaggccctggaatggctggcctggatcgactgggacgacgacaagagctacagcaccagcctgaaaacccggctgaccatcagcaaggacaccagcaagaaccaggtggtgctgaccatgaccaacatggaccccgtggacaccgccacctactactgcgcccggatgcatctgcccctggtgttcgatagctggggccagggcaccctggtcaccgtcagctca

SEQ ID NO: 90 - DNA, 324 bp, Homo Sapiens
gaaatcgtgctgacccagagccccgccaccctgtctctgagccctggcgagagagccaccctgagctgccgggccagccagttcatcggcagcagatacctggcttggtatcagcagaagcccggccaggcccccagactgctgatctacggcgccagcaaccgggccaccggcatccctgccagattttctggcagcggcagcggcaccgacttcaccctgaccatcagcagcctggaacccgaggacttcgccgtgtactactgccagcagtactacgactacccccagaccttcggccagggcaccaaggtggaaatcaag

SEQ ID NO: 91 - protein, 7 aa, Homo Sapien
NRGGGVG

SEQ ID NO: 92 - protein, 16 aa, Homo Sapien
WIDWDDDKSYSTSLKT

SEQ ID NO: 93 - protein, 9 aa, Homo Sapien
MHLPLVFDS

SEQ ID NO: 94 - protein, 12 aa, Homo Sapien
RASQFIGSRYLA

SEQ ID NO: 95 - protein, 7 aa, Homo Sapien
GASNRAT

SEQ ID NO: 96 - protein, 9 aa, Homo Sapien
QQYWSIPIT

SEQ ID NO: 97 - protein, 9 aa, Homo Sapien
GFSLSNRGG

SEQ ID NO: 98 - protein, 5 aa, Homo Sapien
DWDDD

SEQ ID NO: 99 - protein, 9 aa, Homo Sapien
MHLPLVFDS

SEQ ID NO: 100 - protein, 8 aa, Homo Sapien
SQFIGSRY

SEQ ID NO: 101 - protein, 3 aa, Homo Sapien
GAS

SEQ ID NO: 102 - protein, 6 aa, Homo Sapien
YWSIPI

SEQ ID NO: 103 - protein, 108 aa, Homo Sapien
DIVLTQSPATLSLSPGERATLSCRASQFIGSRYLAWYQQKPGQAPRLLIYGASNRATGVPARFSGSGSGTDFTLTISSLEPEDFAVYYCQQYWSIPITFGQGTKVEIK

SEQ ID NO: 104 - protein, 119 aa, Homo Sapien; identical to SEQ ID NO: 80

SEQ ID NO: 105 - protein, 108 aa, Homo Sapien
EIVLTQSPATLSLSPGERATLSCRASQFIGSRYLAWYQQKPGQAPRLLIYGASNRATGIPARFSGSGSGTDFTLTISSLEPEDFAVYYCQQYWSIPITFGQGTKVEIK

SEQ ID NO: 106 - protein, 119 aa, Homo Sapien; identical to SEQ ID NO: 87

SEQ ID NO: 107 - DNA, 324 bp, Homo Sapien
gatatcgtgctgacccagagcccggcgaccctgagcctgtctccgggcgaacgtgcgaccctgagctgcagagcgagccagtttattggttctcgttatctggcttggtaccagcagaaaccaggtcaagcaccgcgtctattaatttatggtgcttctaatcgtgcaactggggtcccggcgcgttttagcggctctggatccggcacggattttaccctgaccattagcagcctggaacctgaagactttgcggtgtattattgccagcagtattggtctattcctattacctttggccagggtacgaaagttgaaattaaa

SEQ ID NO: 108 - DNA, 357 bp, Homo Sapien; identical to SEQ ID NO: 82

SEQ ID NO: 109 - protein, 215 aa, Homo Sapien
DIVLTQSPATLSLSPGERATLSCRASQFIGSRYLAWYQQKPGQAPRLLIYGASNRATGVPARFSGSGSGTDFTLTISSLEPEDFAVYYCQQYWSIPITFGQGTKVEIKRTVAAPSVFIFPPSDEQLKSGTASVVCLLNNFYPREAKVQWKVDNALQSGNSQESVTEQDSKDSTYSLSSTLTLSKADYEKHKVYACEVTHQGLSSPVTKSFNRGEA

SEQ ID NO: 110 - protein, 221 aa, Homo Sapien
QVQLKESGPALVKPTQTLTLTCTFSGFSLSNRGGGVGWIRQPPGKALEWLAWIDWDDDKSYSTSLKTRLTISKDTSKNQVVLTMTNMDPVDTATYYCARMHLPLVFDSWGQGTLVTVSSASTKGPSVFPLAPSSKSTSGGTAALGCLVKDYFPEPVTVSWNSGALTSGVHTFPAVLQSSGLYSLSSVVTVPSSSLGTQTYICNVNHKPSNTKVDKKVEPKS

SEQ ID NO: 111 - DNA, 645 bp, Homo Sapien
gatatcgtgctgacccagagcccggcgaccctgagcctgtctccgggcgaacgtgcgaccctgagctgcagagcgagccagtttattggttctcgttatctggcttggtaccagcagaaaccaggtcaagcaccgcgtctattaatttatggtgcttctaatcgtgcaactggggtcccggcgcgttttagcggctctggatccggcacggattttaccctgaccattagcagcctggaacctgaagactttgcggtgtattattgccagcagtattggtctattcctattacctttggccagggtacgaaagttgaaattaaacgtacggtggctgctccgagcgtgtttatttttccgccgagcgatgaacaactgaaaagcggcacggcgagcgtggtgtgcctgctgaacaacttttatccgcgtgaagcgaaagttcagtggaaagtagacaacgcgctgcaaagcggcaacagccaggaaagcgtgaccgaacaggatagcaaagatagcacctattctctgagcagcaccctgaccctgagcaaagcggattatgaaaaacataaagtgtatgcgtgcgaagtgacccatcaaggtctgagcagcccggtgactaaatcttttaatcgtggcgaggcc

SEQ ID NO: 112 - DNA, 663 bp, Homo Sapien
caggtgcaattgaaagaaagcggcccggccctggtgaaaccgacccaaaccctgaccctgacctgtaccttttccggatttagcctgtctaatcgtggtggtggtgtgggttggattcgccagccgcctgggaaagccctcgagtggctggcttggatcgattgggatgatgataagtcttatagcaccagcctgaaaacgcgtctgaccattagcaaagatacttcgaaaaatcaggtggtgctgactatgaccaacatggacccggtggatacggccacctattattgcgcgcgtatgcatcttcctcttgtttttgattcttggggccaaggcaccctggtgacggttagctcagcgtcgaccaaaggtccaagcgtgtttccgctggctccgagcagcaaaagcaccagcggcggcacggctgccctgggctgcctggttaaagattatttcccggaaccagtcaccgtgagctggaacagcggggcgctgaccagcggcgtgcatacctttccggcggtgctgcaaagcagcggcctgtatagcctgagcagcgttgtgaccgtgccgagcagcagcttaggcactcagacctatatttgcaacgtgaaccataaaccgagcaacaccaaagtggataaaaaagtggaaccgaaaagc

SEQ ID NO: 113 - protein, 5 aa, Homo Sapien
SYGMS

SEQ ID NO: 114 - protein, 17 aa, Homo Sapien
NISNDGHYTYYADSVKG

SEQ ID NO: 115 - protein, 11 aa, Homo Sapien
FQASYLDIMDY

SEQ ID NO: 116 - protein, 11 aa, Homo Sapien
SGDNIGSKYVH

SEQ ID NO: 117 - protein, 7 aa, Homo Sapien
NDSNRPS

SEQ ID NO: 118 - protein, 10 aa, Homo Sapien
QAWGDNGTRV

SEQ ID NO: 119 - protein, 7 aa, Homo Sapien
GFTFSSY

SEQ ID NO: 120 - protein, 6 aa, Homo Sapien
SNDGHY

SEQ ID NO: 121 - protein, 11 aa, Homo Sapien
FQASYLDIMDY

SEQ ID NO: 122 - protein, 7 aa, Homo Sapien
DNIGSKY

SEQ ID NO: 123 - protein, 3 aa, Homo Sapien
NDS

SEQ ID NO: 124 - protein, 7 aa, Homo Sapien
WGDNGTR

SEQ ID NO: 125 - protein, 107 aa, Homo Sapien
DIELTQPPSVSVAPGQSITISCSGDNIGSKYVHWYQQKPGQAPVLVIYNDSNRPSGIPERFSGSNSGNTATLTISGTQAEDEADYYCQAWGDNGTRVFGGGTKLTVL

SEQ ID NO: 126 - protein, 120 aa, Homo Sapien
QVQLVESGGGLVQPGGSLRLSCAASGFTFSSYGMSWVRQAPGKGLEWVSNISNDGHYTYYADSVKGRFTISRDNSKNTLYLQMNSLRAEDTAVYYCARFQASYLDIMDYWGQGTLVTVSS

SEQ ID NO: 127 - protein, 107 aa, Homo Sapien
SYELTQPPSVSVSPGQTASITCSGDNIGSKYVHWYQQKPGQSPVLVIYNDSNRPSGIPERFSGSNSGNTATLTISGTQAMDEADYYCQAWGDNGTRVFGGGTKLTVL

SEQ ID NO: 128 - protein, 120 aa, Homo Sapien
EVQLVESGGGLVQPGGSLRLSCAASGFTFSSYGMSWVRQAPGKGLEWVSNISNDGHYTYYADSVKGRFTISRDNSKNTLYLQMNSLRAEDTAVYYCARFQASYLDIMDYWGQGTLVTVSS

SEQ ID NO: 129 - DNA, 321 bp, Homo Sapien
gatatcgaactgacccagccgccttcagtgagcgttgcaccaggtcagagcattaccatctcgtgtagcggcgataatattggttctaagtatgttcattggtaccagcagaaacccgggcaggcgccagttcttgtgatttataatgattctaatcgtccctcaggcatcccggaacgctttagcggatccaacagcggcaacaccgcgaccctgaccattagcggcactcaggcggaagacgaagcggattattattgccaggcttggggtgataatggtactcgtgtgtttggcggcggcacgaagttaaccgttctt

SEQ ID NO: 130 - DNA, 360 bp, Homo Sapien
caggtgcaattggtggaaagcggcggcggcctggtgcaaccgggcggcagcctgcgtctgagctgcgcggcctccggatttaccttttcttcttatggtatgtcttgggtgcgccaagcccctgggaagggtctcgagtgggtgagcaatatttctaatgatggtcattatacttattatgctgattctgttaagggtcgttttaccatttcacgtgataattcgaaaaacaccctgtatctgcaaatgaacagcctgcgtgcggaagatacggccgtgtattattgcgcgcgttttcaggcttcttatcttgatattatggattattggggccaaggcaccctggtgacggttagctca

SEQ ID NO: 131 - protein, 212 aa, Homo Sapien
DIELTQPPSVSVAPGQSITISCSGDNIGSKYVHWYQQKPGQAPVLVIYNDSNRPSGIPERFSGSNSGNTATLTISGTQAEDEADYYCQAWGDNGTRVFGGGTKLTVLGQPKAAPSVTLFPPSSEELQANKATLVCLISDFYPGAVTVAWKADSSPVKAGVETTTPSKQSNNKYAASSYLSLTPEQWKSHRSYSCQVTHEGSTVEKTVAPTEA

SEQ ID NO: 132 - protein, 222 aa, Homo Sapien
QVQLVESGGGLVQPGGSLRLSCAASGFTFSSYGMSWVRQAPGKGLEWVSNISNDGHYTYYADSVKGRFTISRDNSKNTLYLQMNSLRAEDTAVYYCARFQASYLDIMDYWGQGTLVTVSSASTKGPSVFPLAPSSKSTSGGTAALGCLVKDYFPEPVTVSWNSGALTSGVHTFPAVLQSSGLYSLSSVVTVPSSSLGTQTYICNVNHKPSNTKVDKKVEPKS

SEQ ID NO: 133 - DNA, 636 bp, Homo Sapien
gatatcgaactgacccagccgccttcagtgagcgttgcaccaggtcagagcattaccatctcgtgtagcggcgataatattggttctaagtatgttcattggtaccagcagaaacccgggcaggcgccagttcttgtgatttataatgattctaatcgtccctcaggcatcccggaacgctttagcggatccaacagcggcaacaccgcgaccctgaccattagcggcactcaggcggaagacgaagcggattattattgccaggcttggggtgataatggtactcgtgtgtttggcggcggcacgaagttaaccgttcttggccagccgaaagccgcaccgagtgtgacgctgtttccgccgagcagcgaagaattgcaggcgaacaaagcgaccctggtgtgcctgattagcgacttttatccgggagccgtgacagtggcctggaaggcagatagcagccccgtcaaggcgggagtggagaccaccacaccctccaaacaaagcaacaacaagtacgcggccagcagctatctgagcctgacgcctgagcagtggaagtcccacagaagctacagctgccaggtcacgcatgaggggagcaccgtggaaaaaaccgttgcgccgactgaggcc

SEQ ID NO: 134 - DNA, 666 bp, Homo Sapien
caggtgcaattggtggaaagcggcggcggcctggtgcaaccgggcggcagcctgcgtctgagctgcgcggcctccggatttaccttttcttcttatggtatgtcttgggtgcgccaagcccctgggaagggtctcgagtgggtgagcaatatttctaatgatggtcattatacttattatgctgattctgttaagggtcgttttaccatttcacgtgataattcgaaaaacaccctgtatctgcaaatgaacagcctgcgtgcggaagatacggccgtgtattattgcgcgcgttttcaggcttcttatcttgatattatggattattggggccaaggcaccctggtgacggttagctcagcgtcgaccaaaggtccaagcgtgtttccgctggctccgagcagcaaaagcaccagcggcggcacggctgccctgggctgcctggttaaagattatttcccggaaccagtcaccgtgagctggaacagcggggcgctgaccagcggcgtgcatacctttccggcggtgctgcaaagcagcggcctgtatagcctgagcagcgttgtgaccgtgccgagcagcagcttaggcactcagacctatatttgcaacgtgaaccataaaccgagcaacaccaaagtggataaaaaagtggaaccgaaaagc

SEQ ID NO: 135 - protein, 107 aa, Homo Sapien
SYELTQPLSVSVALGQTARITCGGDNIGSKYVHWYQQKPGQAPVLVIYNDSNRPSGIPERFSGSNSGNTATLTISRAQAGDEADYYCQAWGDNGTRVFGGGTKLTVL

SEQ ID NO: 136 - protein, 120 aa, Homo Sapien
EVQLLESGGGLVQPGGSLRLSCAASGFTFSSYGMSWVRQAPGKGLEWVSNISNDGHYTYYADSVKGRFTISRDNSKNTLYLQMNSLRAEDTAVYYCARFQASYLDIMDYWGQGTLVTVSS

SEQ ID NO: 137 - DNA, 321 bp, Homo Sapien
agctatgaactgacccagccgctgagtgttagcgttgcgctgggtcagaccgcgcgtattacctgcggcggtgataacattggcagcaaatatgtgcattggtatcagcagaaaccgggccaggcgccggtgctggtgatttataacgatagcaaccgtccgagcggcattccggaacgttttagcggcagcaacagcggcaataccgcgaccctgaccattagccgtgcgcaggcgggtgatgaagcggattattattgccaggcgtggggcgataatggtacgcgtgtgtttggcggtggtacgaagttaaccgttctt

SEQ ID NO: 138 - DNA, 360 bp, Homo Sapien
gaggtgcaattgctggaaagcggcggcggcctggtgcaaccgggcggcagcctgcgtctgagctgcgcggcctccggatttaccttttcttcttatggtatgtcttgggtgcgccaagcccctgggaagggtctcgagtgggtgagcaatatttctaatgatggtcattatacttattatgctgattctgttaagggtcgttttaccatttcacgtgataattcgaaaaacaccctgtatctgcaaatgaacagcctgcgtgcggaagatacggccgtgtattattgcgcgcgttttcaggcttcttatcttgatattatggattattggggccaaggcaccctggtgacggttagctca

SEQ ID NO: 139 - DNA, 726 bp, Homo Sapien
gatatcgttctgacccagagtccggcaaccctgagcctgagtccgggtgaacgtgccaccctgagctgtcgtgcaagccagtttattggtagccgttatctggcatggtatcagcagaaaccgggtcaggcaccgcgtctgctgatttatggtgcaagcaatcgtgcaaccggtgttccggcacgttttagcggtagcggtagtggcaccgattttaccctgaccattagcagcctggaaccggaagattttgcaacctattattgccagcagtattatgattatccgcagacctttggtcagggcaccaaggtggaaattaaaggtggtggtggtagcggtggtggtggctcaggtggtggcggtagtcaggttcaattgaaagaaagcggtccggcactggttaaaccgacccagaccctgaccctgacatgtacctttagcggttttagcctgagcaatcgtggtggtggtgttggttggattcgtcagcctccgggtaaagcactggaatggctggcatggattgattgggatgatgataaaagctatagcaccagcctgaaaacccgtctgaccattagtaaagataccagcaaaaatcaggtggttctgaccatgaccaatatggatccggttgataccgccacctattattgtgcacgtatgcatctgccgctggtttttgatagctggggtcagggtacactagttaccgttagcagc

SEQ ID NO: 140 - protein, 242 aa, Homo Sapien
DIVLTQSPATLSLSPGERATLSCRASQFIGSRYLAWYQQKPGQAPRLLIYGASNRATGVPARFSGSGSGTDFTLTISSLEPEDFATYYCQQYYDYPQTFGQGTKVEIKGGGGSGGGGSGGGGSQVQLKESGPALVKPTQTLTLTCTFSGFSLSNRGGGVGWIRQPPGKALEWLAWIDWDDDKSYSTSLKTRLTISKDTSKNQVVLTMTNMDPVDTATYYCARMHLPLVFDSWGQGTLVTVSS

SEQ ID NO: 141 - DNA, 741 bp, Homo Sapien
gatatcgtgctgacacagagccctgccaccctgtctctgagccctggcgagagagccaccctgagctgccgggccagccagttcatcggctcccgctacctggcctggtatcagcagaagcccggacaggctcccagactgctgatctacggcgccagcaacagagctaccggcgtgcccgccagattttctggcagcggcagcggcaccgacttcaccctgaccatcagcagcctggaacccgaggacttcgccacctactactgccagcagtactacgactacccccagaccttcggccagggcaccaaggtggagatcaagggcggaggcggatccgggggtggcggaagtggaggcggaggaagcggagggggcggaagccaggtgcaattgaaagagtccggccctgccctggtgaagcctacccagaccctgaccctgacatgcaccttcagcggcttcagcctgagcaacagaggcggcggagtgggctggatcagacagcctcccggcaaggccctggaatggctggcctggatcgactgggacgacgacaagagctacagcaccagcctgaaaacccggctgaccatctccaaggacaccagcaagaaccaggtggtgctcaccatgaccaacatggaccccgtggacaccgccacctattattgcgcccggatgcatctgcccctggtgttcgatagctggggccagggaaccctggtgacagtgtccagc

SEQ ID NO: 142 - protein, 247 aa, Homo Sapien
DIVLTQSPATLSLSPGERATLSCRASQFIGSRYLAWYQQKPGQAPRLLIYGASNRATGVPARFSGSGSGTDFTLTISSLEPEDFATYYCQQYYDYPQTFGQGTKVEIKGGGGSGGGGSGGGGSGGGGSQVQLKESGPALVKPTQTLTLTCTFSGFSLSNRGGGVGWIRQPPGKALEWLAWIDWDDDKSYSTSLKTRLTISKDTSKNQVVLTMTNMDPVDTATYYCARMHLPLVFDSWGQGTLVTVSS

SEQ ID NO: 143 - DNA, 726 bp, Homo Sapien
caggttcaattgaaagaaagcggtccggcactggttaaaccgacccagaccctgaccctgacatgtacctttagcggttttagcctgagcaatcgtggtggtggtgttggttggattcgtcagcctccgggtaaagcactggaatggctggcatggattgattgggatgatgataaaagctatagcaccagcctgaaaacccgtctgaccattagcaaagataccagcaaaaatcaggttgttctgaccatgaccaatatggatccggttgataccgcaacctattattgtgcacgtatgcatctgccgctggtttttgatagctggggtcagggtacactagttaccgttagcagcggtggtggtggtagcggtggtggcggttcaggtggtggtggcagtgatatcgttctgacccagagtccggcaaccctgagcctgagtccgggtgaacgtgccaccctgagctgtcgtgcaagccagtttattggtagccgttatctggcatggtatcagcagaaaccgggtcaggcaccgcgtctgctgatttatggtgcaagcaatcgtgcaaccggtgttccggcacgttttagcggtagcggtagtggcaccgattttaccctgaccattagtagcctggaaccggaagattttgccacctattattgccagcagtattatgattatccgcagacctttggtcagggcaccaaggtggaaattaaa

SEQ ID NO: 144 - protein, 242 aa, Homo Sapien
QVQLKESGPALVKPTQTLTLTCTFSGFSLSNRGGGVGWIRQPPGKALEWLAWIDWDDDKSYSTSLKTRLTISKDTSKNQVVLTMTNMDPVDTATYYCARMHLPLVFDSWGQGTLVTVSSGGGGSGGGGSGGGGSDIVLTQSPATLSLSPGERATLSCRASQFIGSRYLAWYQQKPGQAPRLLIYGASNRATGVPARFSGSGSGTDFTLTISSLEPEDFATYYCQQYYDYPQTFGQGTKVEIK

SEQ ID NO: 145 - DNA, 741 bp, Homo Sapien
caggttcaattgaaagaaagcggtccggcactggttaaaccgacccagaccctgaccctgacatgtacctttagcggttttagcctgagcaatcgtggtggtggtgttggttggattcgtcagcctccgggtaaagcactggaatggctggcatggattgattgggatgatgataaaagctatagcaccagcctgaaaacccgtctgaccattagcaaagataccagcaaaaatcaggttgttctgaccatgaccaatatggatccggttgataccgcaacctattattgtgcacgtatgcatctgccgctggtttttgatagctggggtcagggtacactagttaccgttagcagcggtggtggtggtagcggtggtggcggttcaggtggtggtggcagtggcggtggtggtagtgatatcgttctgacccagagtccggcaaccctgagcctgagtccgggtgaacgtgccaccctgagctgtcgtgcaagccagtttattggtagccgttatctggcatggtatcagcagaaaccgggtcaggcaccgcgtctgctgatttatggtgcaagcaatcgtgcaaccggtgttccggcacgttttagcggtagcggtagtggcaccgattttaccctgaccattagtagcctggaaccggaagattttgccacctattattgccagcagtattatgattatccgcagacctttggtcagggcaccaaggtggaaattaaa

SEQ ID NO: 146 - protein, 247 aa, Homo Sapien
QVQLKESGPALVKPTQTLTLTCTFSGFSLSNRGGGVGWIRQPPGKALEWLAWIDWDDDKSYSTSLKTRLTISKDTSKNQVVLTMTNMDPVDTATYYCARMHLPLVFDSWGQGTLVTVSSGGGGSGGGGSGGGGSGGGGSDIVLTQSPATLSLSPGERATLSCRASQFIGSRYLAWYQQKPGQAPRLLIYGASNRATGVPARFSGSGSGTDFTLTISSLEPEDFATYYCQQYYDYPQTFGQGTKVEIK

SEQ ID NO: 147 - DNA, 732 bp, Homo Sapien
gatatcgaactgacccagcctccgagcgttagcgttgcaccgggtcagaccgcacgtattagctgtagcggtgatagcctgcgtaataaagtttattggtatcagcagaaaccgggtcaggcaccggttctggttatttataaaaataatcgtccgagcggtattccggaacgttttagcggtagcaatagcggtaataccgcaaccctgaccattagcggcacccaggcagaagatgaagcagattattattgccagagctatgatggtcagaaaagcctggtttttggtggtggcaccaagcttaccgttctgggtggtggtggtagcggtggtggtggctcaggtggtggcggttctcaggttcaattggttgaaagtggtggtggtctggttcagcctggtggtagcctgcgtctgagctgtgcagcaagcggttttacctttagcgattatgtgattaattgggttcgccaggcaccgggtaaaggtctggaatgggttagcggtattagctggtcaggtgttaatacccattatgcagatagcgtgaaaggtcgttttaccattagccgtgataatagcaaaaataccctgtatctgcagatgaatagcctgcgtgcagaagataccgcagtttattattgtgcacgtctgggtgcaaccgcaaataatattcgctataaatttatggatgtgtggggtcagggtacactagttaccgttagcagc

SEQ ID NO: 148 - protein, 244 aa, Homo Sapien
DIELTQPPSVSVAPGQTARISCSGDSLRNKVYWYQQKPGQAPVLVIYKNNRPSGIPERFSGSNSGNTATLTISGTQAEDEADYYCQSYDGQKSLVFGGGTKLTVLGGGGSGGGGSGGGGSQVQLVESGGGLVQPGGSLRLSCAASGFTFSDYVINWVRQAPGKGLEWVSGISWSGVNTHYADSVKGRFTISRDNSKNTLYLQMNSLRAEDTAVYYCARLGATANNIRYKFMDVWGQGTLVTVSS

SEQ ID NO: 149 - DNA, 747 bp, Homo Sapien
gatatcgaactgacccagcctccgagcgttagcgttgcaccgggtcagaccgcacgtattagctgtagcggtgatagcctgcgtaataaagtttattggtatcagcagaaaccgggtcaggcaccggttctggttatttataaaaataatcgtccgagcggtattccggaacgttttagcggtagcaatagcggtaataccgcaaccctgaccattagcggcacccaggcagaagatgaagcagattattattgccagagctatgatggtcagaaaagcctggtttttggtggtggcaccaagcttaccgttctgggtggtggtggtagcggtggtggtggctcaggtggtggcggttctggtggcggtggttcacaggttcaattggttgaaagtggtggtggtctggttcagcctggtggtagcctgcgtctgagctgtgcagcaagcggttttacctttagcgattatgtgattaattgggttcgccaggcaccgggtaaaggtctggaatgggttagcggtattagctggtcaggtgttaatacccattatgcagatagcgtgaaaggtcgttttaccattagccgtgataatagcaaaaataccctgtatctgcagatgaatagcctgcgtgcagaagataccgcagtttattattgtgcacgtctgggtgcaaccgcaaataatattcgctataaatttatggatgtgtggggtcagggtacactagttaccgttagcagc

SEQ ID NO: 150 - protein, 249 aa, Homo Sapien
DIELTQPPSVSVAPGQTARISCSGDSLRNKVYWYQQKPGQAPVLVIYKNNRPSGIPERFSGSNSGNTATLTISGTQAEDEADYYCQSYDGQKSLVFGGGTKLTVLGGGGSGGGGSGGGGSGGGGSQVQLVESGGGLVQPGGSLRLSCAASGFTFSDYVINWVRQAPGKGLEWVSGISWSGVNTHYADSVKGRFTISRDNSKNTLYLQMNSLRAEDTAVYYCARLGATANNIRYKFMDVWGQGTLVTVSS

SEQ ID NO: 151 - DNA, 732 bp, Homo Sapien
caggttcaattggttgaaagcggtggtggtctggttcagcctggtggtagcctgcgtctgagctgtgcagcaagcggttttacctttagcgattatgtgattaattgggttcgtcaggcaccgggtaaaggtctggaatgggttagcggtattagctggtcaggtgttaatacccattatgcagatagcgtgaaaggtcgttttaccattagccgtgataatagcaaaaataccctgtatctgcagatgaatagcctgcgtgcagaagataccgcagtttattattgtgcacgtctgggtgcaaccgcaaataatattcgctataaatttatggatgtgtggggtcagggtacactagttaccgttagcagtggtggtggtggtagcggtggtggcggatctggtggcggtggcagtgatatcgaactgacccagcctccgagcgttagcgttgcaccgggtcagaccgcacgtattagctgtagcggtgatagtctgcgtaataaagtttattggtatcagcagaaaccgggtcaggctccggttctggttatttataaaaataatcgtccgagcggtattccggaacgttttagcggtagcaatagcggtaataccgcaaccctgaccattagcggcacccaggcagaagatgaagccgattattattgtcagagctatgatggtcagaaaagcctggtttttggtggtggcaccaagcttaccgttctg

SEQ ID NO: 152 - protein, 244 aa, Homo Sapien
QVQLVESGGGLVQPGGSLRLSCAASGFTFSDYVINWVRQAPGKGLEWVSGISWSGVNTHYADSVKGRFTISRDNSKNTLYLQMNSLRAEDTAVYYCARLGATANNIRYKFMDVWGQGTLVTVSSGGGGSGGGGSGGGGSDIELTQPPSVSVAPGQTARISCSGDSLRNKVYWYQQKPGQAPVLVIYKNNRPSGIPERFSGSNSGNTATLTISGTQAEDEADYYCQSYDGQKSLVFGGGTKLTVL

SEQ ID NO: 153 - DNA, 747 bp, Homo Sapien
caggttcaattggttgaaagcggtggtggtctggttcagcctggtggtagcctgcgtctgagctgtgcagcaagcggttttacctttagcgattatgtgattaattgggttcgtcaggcaccgggtaaaggtctggaatgggttagcggtattagctggtcaggtgttaatacccattatgcagatagcgtgaaaggtcgttttaccattagccgtgataatagcaaaaataccctgtatctgcagatgaatagcctgcgtgcagaagataccgcagtttattattgtgcacgtctgggtgcaaccgcaaataatattcgctataaatttatggatgtgtggggtcagggtacactagttaccgttagcagtggtggtggtggtagcggtggtggcggatctggtggcggtggttcaggtggtggtggcagtgatatcgaactgacccagcctccgagcgttagcgttgcaccgggtcagaccgcacgtattagctgtagcggtgatagtctgcgtaataaagtttattggtatcagcagaaaccgggtcaggctccggttctggttatttataaaaataatcgtccgagcggtattccggaacgttttagcggtagcaatagcggtaataccgcaaccctgaccattagcggcacccaggcagaagatgaagccgattattattgtcagagctatgatggtcagaaaagcctggtttttggtggtggcaccaagcttaccgttctg

SEQ ID NO: 154 - protein, 249 aa, Homo Sapien
QVQLVESGGGLVQPGGSLRLSCAASGFTFSDYVINWVRQAPGKGLEWVSGISWSGVNTHYADSVKGRFTISRDNSKNTLYLQMNSLRAEDTAVYYCARLGATANNIRYKFMDVWGQGTLVTVSSGGGGSGGGGSGGGGSGGGGSDIELTQPPSVSVAPGQTARISCSGDSLRNKVYWYQQKPGQAPVLVIYKNNRPSGIPERFSGSNSGNTATLTISGTQAEDEADYYCQSYDGQKSLVFGGGTKLTVL

SEQ ID NO: 155 - DNA, 723 bp, Homo Sapien
gatatcgaactgacccagcctccgagcgttagcgttgcaccgggtcagaccgcacgtattagctgtagcggtgataatattggcagcaaatatgtgcattggtatcagcagaaaccgggtcaggcaccggttctggttatttatggtgatagcaatcgtccgagcggtattccggaacgttttagcggtagcaatagcggtaataccgcaaccctgaccattagcggcacccaggcagaagatgaagcagattattattgtacccgtaccagcaccccgattagcggtgtttttggtggtggcaccaagcttaccgttctgggtggtggtggtagcggtggtggtggctcaggtggtggtggttcacaggttcaattggttgaaagtggtggtggtctggttcagcctggtggtagcctgcgtctgagctgtgcagcaagcggttttacctttagcgttaatggtatgcattgggttcgccaggcaccgggtaaaggtctggaatgggttagcgttattgatggtatgggccatacctattatgccgatagcgttaaaggtcgttttaccattagccgtgataatagcaaaaataccctgtatctgcagatgaatagcctgcgtgcagaagataccgcagtttattattgcgcacgctatgattatattaaatatggtgcctttgatccgtggggtcagggtacactagttaccgttagcagc

SEQ ID NO: 156 - protein, 241 aa, Homo Sapien
DIELTQPPSVSVAPGQTARISCSGDNIGSKYVHWYQQKPGQAPVLVIYGDSNRPSGIPERFSGSNSGNTATLTISGTQAEDEADYYCTRTSTPISGVFGGGTKLTVLGGGGSGGGGSGGGGSQVQLVESGGGLVQPGGSLRLSCAASGFTFSVNGMHWVRQAPGKGLEWVSVIDGMGHTYYADSVKGRFTISRDNSKNTLYLQMNSLRAEDTAVYYCARYDYIKYGAFDPWGQGTLVTVSS

SEQ ID NO: 157 - DNA, 738 bp, Homo Sapien
gatatcgaactgacccagcctccgagcgttagcgttgcaccgggtcagaccgcacgtattagctgtagcggtgataatattggcagcaaatatgtgcattggtatcagcagaaaccgggtcaggcaccggttctggttatttatggtgatagcaatcgtccgagcggtattccggaacgttttagcggtagcaatagcggtaataccgcaaccctgaccattagcggcacccaggcagaagatgaagcagattattattgtacccgtaccagcaccccgattagcggtgtttttggtggtggcaccaagcttaccgttctgggtggtggtggtagcggtggtggtggctcaggtggtggcggttctggtggcggtggttcacaggttcaattggttgaaagtggtggtggtctggttcagcctggtggtagcctgcgtctgagctgtgcagcaagcggttttacctttagcgttaatggtatgcattgggttcgccaggcaccgggtaaaggtctggaatgggttagcgttattgatggtatgggccatacctattatgccgatagcgttaaaggtcgttttaccattagccgtgataatagcaaaaataccctgtatctgcagatgaatagcctgcgtgcagaagataccgcagtttattattgcgcacgctatgattatattaaatatggtgcctttgatccgtggggtcagggtacactagttaccgttagcagc

SEQ ID NO: 158 - protein, 246 aa, Homo Sapien
DIELTQPPSVSVAPGQTARISCSGDNIGSKYVHWYQQKPGQAPVLVIYGDSNRPSGIPERFSGSNSGNTATLTISGTQAEDEADYYCTRTSTPISGVFGGGTKLTVLGGGGSGGGGSGGGGSGGGGSQVQLVESGGGLVQPGGSLRLSCAASGFTFSVNGMHWVRQAPGKGLEWVSVIDGMGHTYYADSVKGRFTISRDNSKNTLYLQMNSLRAEDTAVYYCARYDYIKYGAFDPWGQGTLVTVSS

SEQ ID NO: 159 - DNA, 723 bp, Homo Sapien
caggttcaattggttgaaagcggtggtggtctggttcagcctggtggtagcctgcgtctgagctgtgcagcaagcggttttacctttagcgttaatggtatgcattgggttcgtcaggcaccgggtaaaggtctggaatgggttagcgttattgatggtatgggccatacctattatgccgatagcgttaaaggtcgttttaccattagccgtgataatagcaaaaataccctgtatctgcagatgaatagcctgcgtgcagaagataccgcagtttattattgtgcccgttatgattatattaaatatggtgcctttgatccgtggggtcagggtacactagttaccgttagcagtggtggtggtggtagcggtggtggcggatctggtggcggtggttcagatatcgaactgacccagcctccgagcgttagcgttgcaccgggtcagaccgcacgtattagctgtagcggtgataatattggcagcaaatatgtgcattggtatcagcagaaaccgggtcaggctccggttctggttatttatggtgatagcaatcgtccgagcggtattccggaacgttttagcggtagcaatagcggtaataccgcaaccctgaccattagcggcacccaggcagaagatgaagccgattattattgcacccgtaccagcaccccgattagcggtgtttttggtggtggcaccaagcttaccgttctg

SEQ ID NO: 160 - protein, 241 aa, Homo Sapien
QVQLVESGGGLVQPGGSLRLSCAASGFTFSVNGMHWVRQAPGKGLEWVSVIDGMGHTYYADSVKGRFTISRDNSKNTLYLQMNSLRAEDTAVYYCARYDYIKYGAFDPWGQGTLVTVSSGGGGSGGGGSGGGGSDIELTQPPSVSVAPGQTARISCSGDNIGSKYVHWYQQKPGQAPVLVIYGDSNRPSGIPERFSGSNSGNTATLTISGTQAEDEADYYCTRTSTPISGVFGGGTKLTVL

SEQ ID NO: 161 - DNA, 738 bp, Homo Sapien
caggttcaattggttgaaagcggtggtggtctggttcagcctggtggtagcctgcgtctgagctgtgcagcaagcggttttacctttagcgttaatggtatgcattgggttcgtcaggcaccgggtaaaggtctggaatgggttagcgttattgatggtatgggccatacctattatgccgatagcgttaaaggtcgttttaccattagccgtgataatagcaaaaataccctgtatctgcagatgaatagcctgcgtgcagaagataccgcagtttattattgtgcccgttatgattatattaaatatggtgcctttgatccgtggggtcagggtacactagttaccgttagcagtggtggtggtggtagcggtggtggcggatctggtggcggtggttcaggtggtggtggcagtgatatcgaactgacccagcctccgagcgttagcgttgcaccgggtcagaccgcacgtattagctgtagcggtgataatattggcagcaaatatgtgcattggtatcagcagaaaccgggtcaggctccggttctggttatttatggtgatagcaatcgtccgagcggtattccggaacgttttagcggtagcaatagcggtaataccgcaaccctgaccattagcggcacccaggcagaagatgaagccgattattattgcacccgtaccagcaccccgattagcggtgtttttggtggtggcaccaagcttaccgttctg

SEQ ID NO: 162 - protein, 246 aa, Homo Sapien
QVQLVESGGGLVQPGGSLRLSCAASGFTFSVNGMHWVRQAPGKGLEWVSVIDGMGHTYYADSVKGRFTISRDNSKNTLYLQMNSLRAEDTAVYYCARYDYIKYGAFDPWGQGTLVTVSSGGGGSGGGGSGGGGSGGGGSDIELTQPPSVSVAPGQTARISCSGDNIGSKYVHWYQQKPGQAPVLVIYGDSNRPSGIPERFSGSNSGNTATLTISGTQAEDEADYYCTRTSTPISGVFGGGTKLTVL

SEQ ID NO: 163 - DNA, 2121 bp, Homo Sapien
caggtgcaattggtcgagtctggcggaggactggtgcagcctggtggcagcctgagactgagctgcgccgccagcggcttcaccttcagcgactacgtgatcaactgggtgcgacaggcccctggaaagggcctggaatgggtgtccggcatctcttggtctggcgtgaacacccactacgccgacagcgtgaagggccggttcaccatcagccgggacaacagcaagaacaccctgtacctgcagatgaacagcctgagagccgaggacaccgccgtgtactactgtgccagactgggcgccaccgccaacaacatccggtacaagttcatggacgtgtggggccagggcacactggtgaccgtcagctcagctagcaccaagggccccagcgtgttccccctggcccccagcagcaagagcaccagcggcggcacagccgccctgggctgcctggtgaaggactacttccccgagcccgtgaccgtgtcctggaacagcggagccctgacctccggcgtgcacaccttccccgccgtgctgcagagcagcggcctgtacagcctgtccagcgtggtgacagtgcccagcagcagcctgggcacccagacctacatctgcaacgtgaaccacaagcccagcaacaccaaggtggacaagagagtggagcccaagagctgcgacaagacccacacctgccccccctgcccagccccagaggcagcgggcggaccctccgtgttcctgttcccccccaagcccaaggacaccctgatgatcagcaggacccccgaggtgacctgcgtggtggtggacgtgagccacgaggacccagaggtgaagttcaactggtacgtggacggcgtggaggtgcacaacgccaagaccaagcccagagaggagcagtacaacagcacctacagggtggtgtccgtgctgaccgtgctgcaccaggactggctgaacggcaaggaatacaagtgcaaggtctccaacaaggccctgccagcccccatcgaaaagaccatcagcaaggccaagggccagccacgggagccccaggtgtacaccctgcccccctcccgggaggagatgaccaagaaccaggtgtccctgacctgtctggtgaagggcttctaccccagcgacatcgccgtggagtgggagagcaacggccagcccgagaacaactacaagaccacccccccagtgctggacagcgacggcagcttcttcctgtacagcaagctgaccgtggacaagtccaggtggcagcagggcaacgtgttcagctgcagcgtgatgcacgaagcgctgcacaaccactacacccagaagagcctgagcctgtcccccggcaagggcggctccggcggaagcgatatcgtgctgacacagagccctgccaccctgtctctgagccctggcgagagagccaccctgagctgccgggccagccagttcatcggctcccgctacctggcctggtatcagcagaagcccggacaggctcccagactgctgatctacggcgccagcaacagagctaccggcgtgcccgccagattttctggcagcggcagcggcaccgacttcaccctgaccatcagcagcctggaacccgaggacttcgccacctactactgccagcagtactacgactacccccagaccttcggccagggcaccaaggtggagatcaagggcggaggcggatccgggggtggcggaagtggaggcggaggaagcggagggggcggaagccaggtgcaattgaaagagtccggccctgccctggtgaagcctacccagaccctgaccctgacatgcaccttcagcggcttcagcctgagcaacagaggcggcggagtgggctggatcagacagcctcccggcaaggccctggaatggctggcctggatcgactgggacgacgacaagagctacagcaccagcctgaaaacccggctgaccatctccaaggacaccagcaagaaccaggtggtgctcaccatgaccaacatggaccccgtggacaccgccacctattattgcgcccggatgcatctgcccctggtgttcgatagctggggccagggaaccctggtgacagtgtccagc

SEQ ID NO: 164 - protein, 707 aa, Homo Sapien
QVQLVESGGGLVQPGGSLRLSCAASGFTFSDYVINWVRQAPGKGLEWVSGISWSGVNTHYADSVKGRFTISRDNSKNTLYLQMNSLRAEDTAVYYCARLGATANNIRYKFMDVWGQGTLVTVSSASTKGPSVFPLAPSSKSTSGGTAALGCLVKDYFPEPVTVSWNSGALTSGVHTFPAVLQSSGLYSLSSVVTVPSSSLGTQTYICNVNHKPSNTKVDKRVEPKSCDKTHTCPPCPAPEAAGGPSVFLFPPKPKDTLMISRTPEVTCVVVDVSHEDPEVKFNWYVDGVEVHNAKTKPREEQYNSTYRVVSVLTVLHQDWLNGKEYKCKVSNKALPAPIEKTISKAKGQPREPQVYTLPPSREEMTKNQVSLTCLVKGFYPSDIAVEWESNGQPENNYKTTPPVLDSDGSFFLYSKLTVDKSRWQQGNVFSCSVMHEALHNHYTQKSLSLSPGKGGSGGSDIVLTQSPATLSLSPGERATLSCRASQFIGSRYLAWYQQKPGQAPRLLIYGASNRATGVPARFSGSGSGTDFTLTISSLEPEDFATYYCQQYYDYPQTFGQGTKVEIKGGGGSGGGGSGGGGSGGGGSQVQLKESGPALVKPTQTLTLTCTFSGFSLSNRGGGVGWIRQPPGKALEWLAWIDWDDDKSYSTSLKTRLTISKDTSKNQVVLTMTNMDPVDTATYYCARMHLPLVFDSWGQGTLVTVSS

SEQ ID NO: 165 - protein, 105 aa, Homo Sapien; identical to SEQ ID NO: 12

SEQ ID NO: 166 - DNA, 315 bp, Homo Sapien
gacatcgagctgacccagcccccttctgtgtctgtggcccctggccagaccgccagaatcagctgcagcggcgacagcctgcggaacaaggtgtactggtatcagcagaagcccggccaggctcccgtgctggtgatctacaagaacaaccggcccagcggcatccctgagcggttcagcggcagcaacagcggcaataccgccaccctgaccatcagcggcacccaggccgaagatgaggccgactactactgccagagctacgacggccagaaaagcctggtgttcggcggaggcaccaagcttaccgtgctg

SEQ ID NO: 167 - DNA, 633 bp, Homo Sapien
gacatcgagctgacccagcccccttctgtgtctgtggcccctggccagaccgccagaatcagctgcagcggcgacagcctgcggaacaaggtgtactggtatcagcagaagcccggccaggctcccgtgctggtgatctacaagaacaaccggcccagcggcatccctgagcggttcagcggcagcaacagcggcaataccgccaccctgaccatcagcggcacccaggccgaagatgaggccgactactactgccagagctacgacggccagaaaagcctggtgttcggcggaggcaccaagcttaccgtgctgggccagcccaaagccgcccctagcgtgaccctgttcccccccagcagcgaggaactgcaggccaacaaggccaccctggtctgcctgatcagcgacttctaccctggcgccgtgaccgtggcctggaaggccgacagcagccccgtgaaggccggcgtggagacaaccacccccagcaagcagagcaacaacaagtacgccgccagcagctacctgagcctgacccccgagcagtggaagagccacagaagctacagctgccaggtcacccacgagggcagcaccgtggagaaaaccgtggcccccaccgagtgcagc

SEQ ID NO: 168 - protein, 211 aa, Homo Sapien; identical to SEQ ID NO: 16

SEQ ID NO: 169 - protein, 706 aa, Homo Sapien
QVQLVESGGGLVQPGGSLRLSCAASGFTFSDYVINWVRQAPGKGLEWVSGISWSGVNTHYADSVKGRFTISRDNSKNTLYLQMNSLRAEDTAVYYCARLGATANNIRYKFMDVWGQGTLVTVSSASTKGPSVFPLAPSSKSTSGGTAALGCLVKDYFPEPVTVSWNSGALTSGVHTFPAVLQSSGLYSLSSVVTVPSSSLGTQTYICNVNHKPSNTKVDKRVEPKSCDKTHTCPPCPAPEAAGGPSVFLFPPKPKDTLMISRTPEVTCVVVDVSHEDPEVKFNWYVDGVEVHNAKTKPREEQYNSTYRVVSVLTVLHQDWLNGKEYKCKVSNKALPAPIEKTISKAKGQPREPQVYTLPPSREEMTKNQVSLTCLVKGFYPSDIAVEWESNGQPENNYKTTPPVLDSDGSFFLYSKLTVDKSRWQQGNVFSCSVMHEALHNHYTQKSLSLSPGGGSGGSDIVLTQSPATLSLSPGERATLSCRASQFIGSRYLAWYQQKPGQAPRLLIYGASNRATGVPARFSGSGSGTDFTLTISSLEPEDFATYYCQQYYDYPQTFGQGTKVEIKGGGGSGGGGSGGGGSGGGGSQVQLKESGPALVKPTQTLTLTCTFSGFSLSNRGGGVGWIRQPPGKALEWLAWIDWDDDKSYSTSLKTRLTISKDTSKNQVVLTMTNMDPVDTATYYCARMHLPLVFDSWGQGTLVTVSS

SEQ ID NO: 170 - protein, 2118 aa, Homo Sapien
CAGGTGCAATTGGTCGAGTCTGGCGGAGGACTGGTGCAGCCTGGTGGCAGCCTGAGACTGAGCTGCGCCGCCAGCGGCTTCACCTTCAGCGACTACGTGATCAACTGGGTGCGACAGGCCCCTGGAAAGGGCCTGGAATGGGTGTCCGGCATCTCTTGGTCTGGCGTGAACACCCACTACGCCGACAGCGTGAAGGGCCGGTTCACCATCAGCCGGGACAACAGCAAGAACACCCTGTACCTGCAGATGAACAGCCTGAGAGCCGAGGACACCGCCGTGTACTACTGTGCCAGACTGGGCGCCACCGCCAACAACATCCGGTACAAGTTCATGGACGTGTGGGGCCAGGGCACACTGGTGACCGTCAGCTCAGCTAGCACCAAGGGCCCCAGCGTGTTCCCCCTGGCCCCCAGCAGCAAGAGCACCAGCGGCGGCACAGCCGCCCTGGGCTGCCTGGTGAAGGACTACTTCCCCGAGCCCGTGACCGTGTCCTGGAACAGCGGAGCCCTGACCTCCGGCGTGCACACCTTCCCCGCCGTGCTGCAGAGCAGCGGCCTGTACAGCCTGTCCAGCGTGGTGACAGTGCCCAGCAGCAGCCTGGGCACCCAGACCTACATCTGCAACGTGAACCACAAGCCCAGCAACACCAAGGTGGACAAGAGAGTGGAGCCCAAGAGCTGCGACAAGACCCACACCTGCCCCCCCTGCCCAGCCCCAGAGGCAGCGGGCGGACCCTCCGTGTTCCTGTTCCCCCCCAAGCCCAAGGACACCCTGATGATCAGCAGGACCCCCGAGGTGACCTGCGTGGTGGTGGACGTGAGCCACGAGGACCCAGAGGTGAAGTTCAACTGGTACGTGGACGGCGTGGAGGTGCACAACGCCAAGACCAAGCCCAGAGAGGAGCAGTACAACAGCACCTACAGGGTGGTGTCCGTGCTGACCGTGCTGCACCAGGACTGGCTGAACGGCAAGGAATACAAGTGCAAGGTCTCCAACAAGGCCCTGCCAGCCCCCATCGAAAAGACCATCAGCAAGGCCAAGGGCCAGCCACGGGAGCCCCAGGTGTACACCCTGCCCCCCTCCCGGGAGGAGATGACCAAGAACCAGGTGTCCCTGACCTGTCTGGTGAAGGGCTTCTACCCCAGCGACATCGCCGTGGAGTGGGAGAGCAACGGCCAGCCCGAGAACAACTACAAGACCACCCCCCCAGTGCTGGACAGCGACGGCAGCTTCTTCCTGTACAGCAAGCTGACCGTGGACAAGTCCAGGTGGCAGCAGGGCAACGTGTTCAGCTGCAGCGTGATGCACGAAGCGCTGCACAACCACTACACCCAGAAGAGCCTGAGCCTGTCCCCCGGCGGCGGCTCCGGCGGAAGCGATATCGTGCTGACACAGAGCCCTGCCACCCTGTCTCTGAGCCCTGGCGAGAGAGCCACCCTGAGCTGCCGGGCCAGCCAGTTCATCGGCTCCCGCTACCTGGCCTGGTATCAGCAGAAGCCCGGACAGGCTCCCAGACTGCTGATCTACGGCGCCAGCAACAGAGCTACCGGCGTGCCCGCCAGATTTTCTGGCAGCGGCAGCGGCACCGACTTCACCCTGACCATCAGCAGCCTGGAACCCGAGGACTTCGCCACCTACTACTGCCAGCAGTACTACGACTACCCCCAGACCTTCGGCCAGGGCACCAAGGTGGAGATCAAGGGCGGAGGCGGATCCGGGGGTGGCGGAAGTGGAGGCGGAGGAAGCGGAGGGGGCGGAAGCCAGGTGCAATTGAAAGAGTCCGGCCCTGCCCTGGTGAAGCCTACCCAGACCCTGACCCTGACATGCACCTTCAGCGGCTTCAGCCTGAGCAACAGAGGCGGCGGAGTGGGCTGGATCAGACAGCCTCCCGGCAAGGCCCTGGAATGGCTGGCCTGGATCGACTGGGACGACGACAAGAGCTACAGCACCAGCCTGAAAACCCGGCTGACCATCTCCAAGGACACCAGCAAGAACCAGGTGGTGCTCACCATGACCAACATGGACCCCGTGGACACCGCCACCTATTATTGCGCCCGGATGCATCTGCCCCTGGTGTTCGATAGCTGGGGCCAGGGAACCCTGGTGACAGTGTCCAGC

SEQ ID NO: 171 - protein, 707 aa, Homo Sapien
QVQLVESGGGLVQPGGSLRLSCAASGFTFSDYVINWVRQAPGKGLEWVSGISWSGVNTHYADSVKGRFTISRDNSKNTLYLQMNSLRAEDTAVYYCARLGATANNIRYKFMDVWGQGTLVTVSSASTKGPSVFPLAPSSKSTSGGTAALGCLVKDYFPEPVTVSWNSGALTSGVHTFPAVLQSSGLYSLSSVVTVPSSSLGTQTYICNVNHKPSNTKVDKRVEPKSCDKTHTCPPCPAPEAAGGPSVFLFPPKPKDTLMISRTPEVTCVVVDVSHEDPEVKFNWYVDGVEVHNAKTKPREEQYNSTYRVVSVLTVLHQDWLNGKEYKCKVSNKALPAPIEKTISKAKGQPREPQVYTLPPSREEMTKNQVSLTCLVKGFYPSDIAVEWESNGQPENNYKTTPPVLDSDGSFFLYSKLTVDKSRWQQGNVFSCSVMHEALHNHYTQKSLSLSPGKGGSGGSDIVLTQSPATLSLSPGERATLSCRASQFIGSRYLAWYQQKPGQAPRLLIYGASNRATGVPARFSGSGSGTDFTLTISSLEPEDFATYYCQQYYDYPQTFGQGTKVEIKGGGGSGGGGSGGGGSGGGGSQVQLKESGPALVKPTQTLTLTCTFSGFSLSNRGGGVGWIRQPPGKALEWLAWIDWDDDKSYSTSLKTRLTISKDTSKNQVVLTMTNMDAVDTATYYCARMHLPLVFDSWGQGTLVTVSS

SEQ ID NO: 172 - DNA, 2121 bp, Homo Sapien
caggtgcaattggtcgagtctggcggaggactggtgcagcctggtggcagcctgagactgagctgcgccgccagcggcttcaccttcagcgactacgtgatcaactgggtgcgacaggcccctggaaagggcctggaatgggtgtccggcatctcttggtctggcgtgaacacccactacgccgacagcgtgaagggccggttcaccatcagccgggacaacagcaagaacaccctgtacctgcagatgaacagcctgagagccgaggacaccgccgtgtactactgtgccagactgggcgccaccgccaacaacatccggtacaagttcatggacgtgtggggccagggcacactggtgaccgtcagctcagctagcaccaagggccccagcgtgttccccctggcccccagcagcaagagcaccagcggcggcacagccgccctgggctgcctggtgaaggactacttccccgagcccgtgaccgtgtcctggaacagcggagccctgacctccggcgtgcacaccttccccgccgtgctgcagagcagcggcctgtacagcctgtccagcgtggtgacagtgcccagcagcagcctgggcacccagacctacatctgcaacgtgaaccacaagcccagcaacaccaaggtggacaagagagtggagcccaagagctgcgacaagacccacacctgccccccctgcccagccccagaggcagcgggcggaccctccgtgttcctgttcccccccaagcccaaggacaccctgatgatcagcaggacccccgaggtgacctgcgtggtggtggacgtgagccacgaggacccagaggtgaagttcaactggtacgtggacggcgtggaggtgcacaacgccaagaccaagcccagagaggagcagtacaacagcacctacagggtggtgtccgtgctgaccgtgctgcaccaggactggctgaacggcaaggaatacaagtgcaaggtctccaacaaggccctgccagcccccatcgaaaagaccatcagcaaggccaagggccagccacgggagccccaggtgtacaccctgcccccctcccgggaggagatgaccaagaaccaggtgtccctgacctgtctggtgaagggcttctaccccagcgacatcgccgtggagtgggagagcaacggccagcccgagaacaactacaagaccacccccccagtgctggacagcgacggcagcttcttcctgtacagcaagctgaccgtggacaagtccaggtggcagcagggcaacgtgttcagctgcagcgtgatgcacgaagcgctgcacaaccactacacccagaagagcctgagcctgtcccccggcaagggcggctccggcggaagcgatatcgtgctgacacagagccctgccaccctgtctctgagccctggcgagagagccaccctgagctgccgggccagccagttcatcggctcccgctacctggcctggtatcagcagaagcccggacaggctcccagactgctgatctacggcgccagcaacagagctaccggcgtgcccgccagattttctggcagcggcagcggcaccgacttcaccctgaccatcagcagcctggaacccgaggacttcgccacctactactgccagcagtactacgactacccccagaccttcggccagggcaccaaggtggagatcaagggcggaggcggatccgggggtggcggaagtggaggcggaggaagcggagggggcggaagccaggtgcaattgaaagagtccggccctgccctggtgaagcctacccagaccctgaccctgacatgcaccttcagcggcttcagcctgagcaacagaggcggcggagtgggctggatcagacagcctcccggcaaggccctggaatggctggcctggatcgactgggacgacgacaagagctacagcaccagcctgaaaacccggctgaccatctccaaggacaccagcaagaaccaggtggtgctcaccatgaccaacatggacgccgtggacaccgccacctattattgcgcccggatgcatctgcccctggtgttcgatagctggggccagggaaccctggtgacagtgtccagc

SEQ ID NO: 173 - protein, 707 aa, Homo Sapien
QVQLVESGGGLVQPGGSLRLSCAASGFTFSDYVINWVRQAPGKGLEWVSGISWSGVNTHYADSVKGRFTISRDNSKNTLYLQMNSLRAEDTAVYYCARLGATANNIRYKFMDVWGQGTLVTVSSASTKGPSVFPLAPSSKSTSGGTAALGCLVKDYFPEPVTVSWNSGALTSGVHTFPAVLQSSGLYSLSSVVTVPSSSLGTQTYICNVNHKPSNTKVDKRVEPKSCDKTHTCPPCPAPEAAGGPSVFLFPPKPKDTLMISRTPEVTCVVVDVSHEDPEVKFNWYVDGVEVHNAKTKPREEQYNSTYRVVSVLTVLHQDWLNGKEYKCKVSNKALPAPIEKTISKAKGQPREPQVYTLPPSREEMTKNQVSLTCLVKGFYPSDIAVEWESNGQPENNYKTTPPVLDSDGSFFLYSKLTVDKSRWQQGNVFSCSVMHEALHNHYTQKSLSLSPGKGGSGGSDIVLTQSPATLSLSPGERATLSCRASQFIGSRYLAWYQQKPGQAPRLLIYGASNRATGVPARFSGSGSGTDFTLTISSLEPEDFATYYCQQYYDYPQTFGQGTKVEIKGGGGSGGGGSGGGGSGGGGSQVQLKESGPALVKPTQTLTLTCTFSGFSLSNRGGGVGWIRQPPGKALEWLAWIDWDDDKSYSTSLKTRLTISKDTSKNQVVLTMTNMTAVDTATYYCARMHLPLVFDSWGQGTLVTVSS

SEQ ID NO: 174 - DNA, 2121 bp, Homo Sapien
caggtgcaattggtcgagtctggcggaggactggtgcagcctggtggcagcctgagactgagctgcgccgccagcggcttcaccttcagcgactacgtgatcaactgggtgcgacaggcccctggaaagggcctggaatgggtgtccggcatctcttggtctggcgtgaacacccactacgccgacagcgtgaagggccggttcaccatcagccgggacaacagcaagaacaccctgtacctgcagatgaacagcctgagagccgaggacaccgccgtgtactactgtgccagactgggcgccaccgccaacaacatccggtacaagttcatggacgtgtggggccagggcacactggtgaccgtcagctcagctagcaccaagggccccagcgtgttccccctggcccccagcagcaagagcaccagcggcggcacagccgccctgggctgcctggtgaaggactacttccccgagcccgtgaccgtgtcctggaacagcggagccctgacctccggcgtgcacaccttccccgccgtgctgcagagcagcggcctgtacagcctgtccagcgtggtgacagtgcccagcagcagcctgggcacccagacctacatctgcaacgtgaaccacaagcccagcaacaccaaggtggacaagagagtggagcccaagagctgcgacaagacccacacctgccccccctgcccagccccagaggcagcgggcggaccctccgtgttcctgttcccccccaagcccaaggacaccctgatgatcagcaggacccccgaggtgacctgcgtggtggtggacgtgagccacgaggacccagaggtgaagttcaactggtacgtggacggcgtggaggtgcacaacgccaagaccaagcccagagaggagcagtacaacagcacctacagggtggtgtccgtgctgaccgtgctgcaccaggactggctgaacggcaaggaatacaagtgcaaggtctccaacaaggccctgccagcccccatcgaaaagaccatcagcaaggccaagggccagccacgggagccccaggtgtacaccctgcccccctcccgggaggagatgaccaagaaccaggtgtccctgacctgtctggtgaagggcttctaccccagcgacatcgccgtggagtgggagagcaacggccagcccgagaacaactacaagaccacccccccagtgctggacagcgacggcagcttcttcctgtacagcaagctgaccgtggacaagtccaggtggcagcagggcaacgtgttcagctgcagcgtgatgcacgaagcgctgcacaaccactacacccagaagagcctgagcctgtcccccggcaagggcggctccggcggaagcgatatcgtgctgacacagagccctgccaccctgtctctgagccctggcgagagagccaccctgagctgccgggccagccagttcatcggctcccgctacctggcctggtatcagcagaagcccggacaggctcccagactgctgatctacggcgccagcaacagagctaccggcgtgcccgccagattttctggcagcggcagcggcaccgacttcaccctgaccatcagcagcctggaacccgaggacttcgccacctactactgccagcagtactacgactacccccagaccttcggccagggcaccaaggtggagatcaagggcggaggcggatccgggggtggcggaagtggaggcggaggaagcggagggggcggaagccaggtgcaattgaaagagtccggccctgccctggtgaagcctacccagaccctgaccctgacatgcaccttcagcggcttcagcctgagcaacagaggcggcggagtgggctggatcagacagcctcccggcaaggccctggaatggctggcctggatcgactgggacgacgacaagagctacagcaccagcctgaaaacccggctgaccatctccaaggacaccagcaagaaccaggtggtgctcaccatgaccaacatgaccgccgtggacaccgccacctattattgcgcccggatgcatctgcccctggtgttcgatagctggggccagggaaccctggtgacagtgtccagc

SEQ ID NO: 175 - protein, 464 aa, Homo Sapien
DIVLTQSPATLSLSPGERATLSCRASQFIGSRYLAWYQQKPGQAPRLLIYGASNRATGVPARFSGSGSGTDFTLTISSLEPEDFATYYCQQYYDYPQTFGQGTKVEIKGGGGSGGGGSGGGGSGGGGSQVQLKESGPALVKPTQTLTLTCTFSGFSLSNRGGGVGWIRQPPGKALEWLAWIDWDDDKSYSTSLKTRLTISKDTSKNQVVLTMTNMDPVDTATYYCARMHLPLVFDSWGQGTLVTVSSGGSGGSDIELTQPPSVSVAPGQTARISCSGDSLRNKVYWYQQKPGQAPVLVIYKNNRPSGIPERFSGSNSGNTATLTISGTQAEDEADYYCQSYDGQKSLVFGGGTKLTVLGQPKAAPSVTLFPPSSEELQANKATLVCLISDFYPGAVTVAWKADSSPVKAGVETTTPSKQSNNKYAASSYLSLTPEQWKSHRSYSCQVTHEGSTVEKTVAPTECS

SEQ ID NO: 176 - DNA, 1392 bp, Homo Sapien
gatatcgtgctgacacagagccctgccaccctgtctctgagccctggcgagagagccaccctgagctgccgggccagccagttcatcggctcccgctacctggcctggtatcagcagaagcccggacaggctcccagactgctgatctacggcgccagcaacagagctaccggcgtgcccgccagattttctggcagcggcagcggcaccgacttcaccctgaccatcagcagcctggaacccgaggacttcgccacctactactgccagcagtactacgactacccccagaccttcggccagggcaccaaggtggagatcaagggcggaggcggatccgggggtggcggaagtggaggcggaggaagcggagggggcggaagccaggtgcaattgaaagagtccggccctgccctggtgaagcctacccagaccctgaccctgacatgcaccttcagcggcttcagcctgagcaacagaggcggcggagtgggctggatcagacagcctcccggcaaggccctggaatggctggcctggatcgactgggacgacgacaagagctacagcaccagcctgaaaacccggctgaccatctccaaggacaccagcaagaaccaggtggtgctcaccatgaccaacatggaccccgtggacaccgccacctattattgcgcccggatgcatctgcccctggtgttcgatagctggggccagggaaccctggtgacagtgtccagcggcggctccggcggaagcgacatcgagctgacccagcccccttctgtgtctgtggcgcccgggcagaccgccagaatcagctgcagcggcgacagcctgcggaacaaggtgtactggtatcagcagaagcccggccaggctcccgtgctggtgatctacaagaacaaccggcccagcggcatccctgagcggttcagcggcagcaacagcggcaataccgccaccctgaccatcagcggcacccaggccgaagatgaggccgactactactgccagagctacgacggccagaaaagcctggtgttcggcggaggcaccaagcttaccgtgctgggccagcccaaagccgcccctagcgtgaccctgttcccccccagcagcgaggaactgcaggccaacaaggccaccctggtctgcctgatcagcgacttctaccctggcgccgtgaccgtggcctggaaggccgacagcagccccgtgaaggccggcgtggagacaaccacccccagcaagcagagcaacaacaagtacgccgccagcagctacctgagcctgacccccgagcagtggaagagccacagaagctacagctgccaggtcacccacgagggcagcaccgtggagaaaaccgtggcccccaccgagtgcagc

SEQ ID NO: 177 - protein, 124 aa, Homo Sapien; identical to SEQ ID NO: 13

SEQ ID NO: 178 - DNA, 372 bp, Homo Sapien
caggtgcaattggtcgagtctggcggaggactggtgcagcctggtggcagcctgagactgagctgcgccgccagcggcttcaccttcagcgactacgtgatcaactgggtgcgacaggcccctggaaagggcctggaatgggtgtccggcatctcttggtctggcgtgaacacccactacgccgacagcgtgaagggccggttcaccatcagccgggacaacagcaagaacaccctgtacctgcagatgaacagcctgagagccgaggacaccgccgtgtactactgtgccagactgggcgccaccgccaacaacatccggtacaagttcatggacgtgtggggccagggcacactggtgaccgtcagctca

SEQ ID NO: 179 - protein, 454 aa, Homo Sapien; identical to SEQ ID NO: 17

SEQ ID NO: 180 - DNA, 1362 bp, Homo Sapien
caggtgcaattggtcgagtctggcggaggactggtgcagcctggtggcagcctgagactgagctgcgccgccagcggcttcaccttcagcgactacgtgatcaactgggtgcgacaggcccctggaaagggcctggaatgggtgtccggcatctcttggtctggcgtgaacacccactacgccgacagcgtgaagggccggttcaccatcagccgggacaacagcaagaacaccctgtacctgcagatgaacagcctgagagccgaggacaccgccgtgtactactgtgccagactgggcgccaccgccaacaacatccggtacaagttcatggacgtgtggggccagggcacactggtgaccgtcagctcagctagcaccaagggccccagcgtgttccccctggcccccagcagcaagagcaccagcggcggcacagccgccctgggctgcctggtgaaggactacttccccgagcccgtgaccgtgtcctggaacagcggagccctgacctccggcgtgcacaccttccccgccgtgctgcagagcagcggcctgtacagcctgtccagcgtggtgacagtgcccagcagcagcctgggcacccagacctacatctgcaacgtgaaccacaagcccagcaacaccaaggtggacaagagagtggagcccaagagctgcgacaagacccacacctgccccccctgcccagccccagaggcagcgggcggaccctccgtgttcctgttcccccccaagcccaaggacaccctgatgatcagcaggacccccgaggtgacctgcgtggtggtggacgtgagccacgaggacccagaggtgaagttcaactggtacgtggacggcgtggaggtgcacaacgccaagaccaagcccagagaggagcagtacaacagcacctacagggtggtgtccgtgctgaccgtgctgcaccaggactggctgaacggcaaggaatacaagtgcaaggtctccaacaaggccctgccagcccccatcgaaaagaccatcagcaaggccaagggccagccacgggagccccaggtgtacaccctgcccccctcccgggaggagatgaccaagaaccaggtgtccctgacctgtctggtgaagggcttctaccccagcgacatcgccgtggagtgggagagcaacggccagcccgagaacaactacaagaccacccccccagtgctggacagcgacggcagcttcttcctgtacagcaagctgaccgtggacaagtccaggtggcagcagggcaacgtgttcagctgcagcgtgatgcacgaggccctgcacaaccactacacccagaagagcctgagcctgtcccccggcaag

SEQ ID NO: 181 - protein, 108 aa, Homo Sapien; identical to SEQ ID NO: 79

SEQ ID NO: 182 - DNA, 324 bp, Homo Sapien; identical to SEQ ID NO: 81

SEQ ID NO: 183 - protein, 215 aa, Homo Sapien; identical to SEQ ID NO: 83

SEQ ID NO: 184 - DNA, 645 bp, Homo Sapien
gatatcgtgctgacccagagcccggcgaccctgagcctgtctccgggcgaacgtgcgaccctgagctgcagagcgagccagtttattggttctcgttatctggcttggtaccagcagaaaccaggtcaagcaccgcgtctattaatttatggtgcttctaatcgtgcaactggggtcccggcgcgttttagcggctctggatccggcacggattttaccctgaccattagcagcctggaacctgaagactttgcgacttattattgccagcagtattatgattatcctcagacctttggccagggtacgaaagttgaaattaaacgtacggtggccgctcccagcgtgttcatcttcccccccagcgacgagcagctgaagagcggcaccgccagcgtggtgtgcctgctgaacaacttctacccccgggaggccaaggtgcagtggaaggtggacaacgccctgcagagcggcaacagccaggagagcgtcaccgagcaggacagcaaggactccacctacagcctgagcagcaccctgaccctgagcaaggccgactacgagaagcataaggtgtacgcctgcgaggtgacccaccagggcctgtccagccccgtgaccaagagcttcaacaggggcgagtgc

SEQ ID NO: 185 - protein, 699 aa, Homo Sapien
QVQLKESGPALVKPTQTLTLTCTFSGFSLSNRGGGVGWIRQPPGKALEWLAWIDWDDDKSYSTSLKTRLTISKDTSKNQVVLTMTNMDPVDTATYYCARMHLPLVFDSWGQGTLVTVSSASTKGPSVFPLAPSSKSTSGGTAALGCLVKDYFPEPVTVSWNSGALTSGVHTFPAVLQSSGLYSLSSVVTVPSSSLGTQTYICNVNHKPSNTKVDKRVEPKSCDKTHTCPPCPAPEAAGGPSVFLFPPKPKDTLMISRTPEVTCVVVDVSHEDPEVKFNWYVDGVEVHNAKTKPREEQYNSTYRVVSVLTVLHQDWLNGKEYKCKVSNKALPAPIEKTISKAKGQPREPQVYTLPPSREEMTKNQVSLTCLVKGFYPSDIAVEWESNGQPENNYKTTPPVLDSDGSFFLYSKLTVDKSRWQQGNVFSCSVMHEALHNHYTQKSLSLSPGKGGSGGSQVQLVESGGGLVQPGGSLRLSCAASGFTFSDYVINWVRQAPGKGLEWVSGISWSGVNTHYADSVKGRFTISRDNSKNTLYLQMNSLRAEDTAVYYCARLGATANNIRYKFMDVWGQGTLVTVSSGGGGSGGGGSGGGGSDIELTQPPSVSVAPGQTARISCSGDSLRNKVYWYQQKPGQAPVLVIYKNNRPSGIPERFSGSNSGNTATLTISGTQAEDEADYYCQSYDGQKSLVFGGGTKLTVL

SEQ ID NO: 186 - DNA, 2097 bp, Homo Sapien
caggtgcaattgaaagaaagcggcccggccctggtgaaaccgacccaaaccctgaccctgacctgtaccttttccggatttagcctgtctaatcgtggtggtggtgtgggttggattcgccagccgcctgggaaagccctcgagtggctggcttggatcgattgggatgatgataagtcttatagcaccagcctgaaaacgcgtctgaccattagcaaagatacttcgaaaaatcaggtggtgctgactatgaccaacatggacccggtggatacggccacctattattgcgcgcgtatgcatcttcctcttgtttttgattcttggggccaaggcaccctggtgacggttagctcagctagcaccaagggccccagcgtgttccccctggcccccagcagcaagagcaccagcggcggcacagccgccctgggctgcctggtgaaggactacttccccgagcccgtgaccgtgtcctggaacagcggagccctgacctccggcgtgcacaccttccccgccgtgctgcagagcagcggcctgtacagcctgtccagcgtggtgacagtgcccagcagcagcctgggcacccagacctacatctgcaacgtgaaccacaagcccagcaacaccaaggtggacaagagagtggagcccaagagctgcgacaagacccacacctgccccccctgcccagccccagaggcagcgggcggaccctccgtgttcctgttcccccccaagcccaaggacaccctgatgatcagcaggacccccgaggtgacctgcgtggtggtggacgtgagccacgaggacccagaggtgaagttcaactggtacgtggacggcgtggaggtgcacaacgccaagaccaagcccagagaggagcagtacaacagcacctacagggtggtgtccgtgctgaccgtgctgcaccaggactggctgaacggcaaggaatacaagtgcaaggtctccaacaaggccctgccagcccccatcgaaaagaccatcagcaaggccaagggccagccacgggagccccaggtgtacaccctgcccccctcccgggaggagatgaccaagaaccaggtgtccctgacctgtctggtgaagggcttctaccccagcgacatcgccgtggagtgggagagcaacggccagcccgagaacaactacaagaccacccccccagtgctggacagcgacggcagcttcttcctgtacagcaagctgaccgtggacaagtccaggtggcagcagggcaacgtgttcagctgcagcgtgatgcacgaagcgctgcacaaccactacacccagaagagcctgagcctgtcccccggcaagggcggctccggcggaagccaggttcaattggttgaaagcggtggtggtctggttcagcctggtggtagcctgcgtctgagctgtgcagcaagcggttttacctttagcgattatgtgattaattgggttcgtcaggcaccgggtaaaggtctggaatgggttagcggtattagctggtcaggtgttaatacccattatgcagatagcgtgaaaggtcgttttaccattagccgtgataatagcaaaaataccctgtatctgcagatgaatagcctgcgtgcagaagataccgcagtttattattgtgcacgtctgggtgcaaccgcaaataatattcgctataaatttatggatgtgtggggtcagggtacactagttaccgttagcagtggtggtggtggtagcggtggtggcggatctggtggcggtggcagtgatatcgaactgacccagcctccgagcgttagcgttgcaccgggtcagaccgcacgtattagctgtagcggtgatagtctgcgtaataaagtttattggtatcagcagaaaccgggtcaggctccggttctggttatttataaaaataatcgtccgagcggtattccggaacgttttagcggtagcaatagcggtaataccgcaaccctgaccattagcggcacccaggcagaagatgaagccgattattattgtcagagctatgatggtcagaaaagcctggtttttggtggtggcaccaagcttaccgttctg

SEQ ID NO: 187 - protein, 704 aa, Homo Sapien
QVQLKESGPALVKPTQTLTLTCTFSGFSLSNRGGGVGWIRQPPGKALEWLAWIDWDDDKSYSTSLKTRLTISKDTSKNQVVLTMTNMDPVDTATYYCARMHLPLVFDSWGQGTLVTVSSASTKGPSVFPLAPSSKSTSGGTAALGCLVKDYFPEPVTVSWNSGALTSGVHTFPAVLQSSGLYSLSSVVTVPSSSLGTQTYICNVNHKPSNTKVDKRVEPKSCDKTHTCPPCPAPEAAGGPSVFLFPPKPKDTLMISRTPEVTCVVVDVSHEDPEVKFNWYVDGVEVHNAKTKPREEQYNSTYRVVSVLTVLHQDWLNGKEYKCKVSNKALPAPIEKTISKAKGQPREPQVYTLPPSREEMTKNQVSLTCLVKGFYPSDIAVEWESNGQPENNYKTTPPVLDSDGSFFLYSKLTVDKSRWQQGNVFSCSVMHEALHNHYTQKSLSLSPGKGGSGGSQVQLVESGGGLVQPGGSLRLSCAASGFTFSDYVINWVRQAPGKGLEWVSGISWSGVNTHYADSVKGRFTISRDNSKNTLYLQMNSLRAEDTAVYYCARLGATANNIRYKFMDVWGQGTLVTVSSGGGGSGGGGSGGGGSGGGGSDIELTQPPSVSVAPGQTARISCSGDSLRNKVYWYQQKPGQAPVLVIYKNNRPSGIPERFSGSNSGNTATLTISGTQAEDEADYYCQSYDGQKSLVFGGGTKLTVL

SEQ ID NO: 188 - DNA, 2112 bp, Homo Sapien
caggtgcaattgaaagaaagcggcccggccctggtgaaaccgacccaaaccctgaccctgacctgtaccttttccggatttagcctgtctaatcgtggtggtggtgtgggttggattcgccagccgcctgggaaagccctcgagtggctggcttggatcgattgggatgatgataagtcttatagcaccagcctgaaaacgcgtctgaccattagcaaagatacttcgaaaaatcaggtggtgctgactatgaccaacatggacccggtggatacggccacctattattgcgcgcgtatgcatcttcctcttgtttttgattcttggggccaaggcaccctggtgacggttagctcagctagcaccaagggccccagcgtgttccccctggcccccagcagcaagagcaccagcggcggcacagccgccctgggctgcctggtgaaggactacttccccgagcccgtgaccgtgtcctggaacagcggagccctgacctccggcgtgcacaccttccccgccgtgctgcagagcagcggcctgtacagcctgtccagcgtggtgacagtgcccagcagcagcctgggcacccagacctacatctgcaacgtgaaccacaagcccagcaacaccaaggtggacaagagagtggagcccaagagctgcgacaagacccacacctgccccccctgcccagccccagaggcagcgggcggaccctccgtgttcctgttcccccccaagcccaaggacaccctgatgatcagcaggacccccgaggtgacctgcgtggtggtggacgtgagccacgaggacccagaggtgaagttcaactggtacgtggacggcgtggaggtgcacaacgccaagaccaagcccagagaggagcagtacaacagcacctacagggtggtgtccgtgctgaccgtgctgcaccaggactggctgaacggcaaggaatacaagtgcaaggtctccaacaaggccctgccagcccccatcgaaaagaccatcagcaaggccaagggccagccacgggagccccaggtgtacaccctgcccccctcccgggaggagatgaccaagaaccaggtgtccctgacctgtctggtgaagggcttctaccccagcgacatcgccgtggagtgggagagcaacggccagcccgagaacaactacaagaccacccccccagtgctggacagcgacggcagcttcttcctgtacagcaagctgaccgtggacaagtccaggtggcagcagggcaacgtgttcagctgcagcgtgatgcacgaagcgctgcacaaccactacacccagaagagcctgagcctgtcccccggcaagggcggctccggcggaagccaggttcaattggttgaaagcggtggtggtctggttcagcctggtggtagcctgcgtctgagctgtgcagcaagcggttttacctttagcgattatgtgattaattgggttcgtcaggcaccgggtaaaggtctggaatgggttagcggtattagctggtcaggtgttaatacccattatgcagatagcgtgaaaggtcgttttaccattagccgtgataatagcaaaaataccctgtatctgcagatgaatagcctgcgtgcagaagataccgcagtttattattgtgcacgtctgggtgcaaccgcaaataatattcgctataaatttatggatgtgtggggtcagggtacactagttaccgttagcagtggtggtggtggtagcggtggtggcggatctggtggcggtggttcaggtggtggtggcagtgatatcgaactgacccagcctccgagcgttagcgttgcaccgggtcagaccgcacgtattagctgtagcggtgatagtctgcgtaataaagtttattggtatcagcagaaaccgggtcaggctccggttctggttatttataaaaataatcgtccgagcggtattccggaacgttttagcggtagcaatagcggtaataccgcaaccctgaccattagcggcacccaggcagaagatgaagccgattattattgtcagagctatgatggtcagaaaagcctggtttttggtggtggcaccaagcttaccgttctg

SEQ ID NO: 189 - protein, 105 aa, Homo Sapien; identical to SEQ ID NO: 12

SEQ ID NO: 190 - DNA, 315 bp, Homo Sapien
gacatcgagctgactcagccccctagcgtgtcagtggctcctggccagaccgctagaattagctgtagcggcgatagcctgcgtaacaaggtctactggtatcagcagaagcccggccaggcccctgtgctggtcatctataagaacaataggcctagcggcatccccgagcggtttagcggctctaatagcggcaacaccgctaccctgactattagcggcactcaggccgaggacgaggccgactactactgtcagtcctacgacggccagaagtcactggtctttggcggcggaactaagctgaccgtgctg

SEQ ID NO: 191 - protein, 10 aa, Homo Sapien
QSYDGQKSLV

SEQ ID NO: 192 - protein, 119 aa, Homo Sapien
EVQLLESGGGLVQPGGSLRLSCAASGFTFSVNGMHWVRQAPGKGLEWVSVIDGMGHTYYADSVKGRFTISRDNSKNTLYLQMNSLRAEDTAVYYCARYDYIKYGAFDPWGQGTLVTVSS

SEQ ID NO: 193 - protein, 211 aa, Homo Sapien; identical to SEQ ID NO: 16

SEQ ID NO: 194 - DNA, 633 bp, Homo Sapien
gacatcgagctgactcagccccctagcgtgtcagtggctcctggccagaccgctagaattagctgtagcggcgatagcctgcgtaacaaggtctactggtatcagcagaagcccggccaggcccctgtgctggtcatctataagaacaataggcctagcggcatccccgagcggtttagcggctctaatagcggcaacaccgctaccctgactattagcggcactcaggccgaggacgaggccgactactactgtcagtcctacgacggccagaagtcactggtctttggcggcggaactaagctgaccgtgctgggacagcctaaggctgcccccagcgtgaccctgttcccccccagcagcgaggagctgcaggccaacaaggccaccctggtgtgcctgatcagcgacttctacccaggcgccgtgaccgtggcctggaaggccgacagcagccccgtgaaggccggcgtggagaccaccacccccagcaagcagagcaacaacaagtacgccgccagcagctacctgagcctgacccccgagcagtggaagagccacaggtcctacagctgccaggtgacccacgagggcagcaccgtggaaaagaccgtggccccaaccgagtgcagc

SEQ ID NO: 195 - protein, 707 aa, Homo Sapien; identical to SEQ ID NO: 164

SEQ ID NO: 196 - DNA, 2121 bp, Homo Sapien
caggtgcagctggtggaatcaggcggaggactggtccagcctggcggatcacttagactgagctgtgccgctagtggcttcacctttagcgactatgtgattaactgggtccgacaggcccctggcaagggactggaatgggtgtcaggcattagttggagcggcgtgaacactcactacgccgatagcgtgaagggccggttcactattagccgggataactctaagaacaccctgtacctgcagatgaatagcctgagagccgaggacaccgccgtctactactgcgctagactgggcgctaccgctaacaacatccgctataagttcatggacgtgtggggccagggcaccctggtcacagtgtcttcagctagcactaagggcccctcagtgttccccctggcccctagctctaagtctactagcggtggcaccgccgctctgggctgcctggtcaaggactacttccccgagcccgtgaccgtgtcttggaatagcggcgctctgactagcggagtgcacaccttccccgccgtgctgcagtctagcggcctgtatagcctgtctagcgtcgtgaccgtgcctagctctagcctgggcactcagacctatatctgtaacgtgaaccacaagcctagtaacactaaggtggacaagcgggtggaacctaagtcttgcgataagactcacacctgtcccccctgccctgccccagaagctgctggcggacctagcgtgttcctgttcccacctaagcctaaagacaccctgatgattagtaggacccccgaagtgacctgcgtggtggtggacgtcagccacgaggaccctgaagtgaagttcaattggtatgtggacggcgtggaagtgcacaacgctaagactaagcctagagaggaacagtataactccacctatagggtggtgtcagtgctgaccgtgctgcaccaggactggctgaacggcaaagagtataagtgtaaagtctctaacaaggccctgcctgcccctatcgaaaagactatctctaaggctaagggccagcctagagaaccccaggtctacaccctgccccctagtagagaagagatgactaagaatcaggtgtccctgacctgtctggtcaagggcttctaccctagcgatatcgccgtggagtgggagtctaacggccagcccgagaacaactataagactaccccccctgtgctggatagcgacggctctttcttcctgtactctaaactgaccgtggacaagtctaggtggcagcagggcaacgtgttcagctgtagcgtgatgcacgaggccctgcacaatcactacactcagaagtcactgagcctgagtcccggcaagggcggctcaggcggtagcgatatcgtgctgactcagtcacccgctaccctgagtctgagccctggcgagcgggctacactgagctgtagagctagtcagtttatcggctcacgctacctggcctggtatcagcagaagcccggccaggcccctagactgctgatctacggcgctagtaatagagctaccggcgtgcccgctaggtttagcggctcaggatcaggcaccgactttaccctgactattagtagcctggaacccgaggacttcgctacctactactgtcagcagtactacgactaccctcagaccttcggccagggaactaaggtcgagattaagggcggtggcggtagcggcggaggcggatcaggtggtggtggtagtggcggcggaggtagtcaggtccagctgaaagagtcaggccctgccctggtcaagcctactcagaccctgaccctgacctgcacttttagcggctttagcctgagtaatagaggcggcggagtgggctggattagacagcctccaggcaaagccctggagtggctggcctggatcgactgggacgacgataagtcctactccactagcctgaaaactaggctgacaatcagcaaggacactagtaaaaaccaggtggtgctgactatgactaatatggaccccgtggacaccgctacctattattgcgctagaatgcacctcccactggtgttcgatagctggggtcagggaactctggtcacagtcagtagc

SEQ ID NO: 197 - protein, 105 aa, Homo Sapien
SYELTQPPSVSVAPGQTARISCSGDSLRNKVYWYQQKPGQAPVLVIYKNNRPSGIPERFSGSNSGNTATLTISGTQAEDEADYYCQSYDGQKSLVFGGGTKLTVL

SEQ ID NO: 198 - DNA, 315 bp, Homo Sapien
tcttacgagctgacccagcccccttccgtgtctgtggctcctggccagaccgccagaatctcttgctccggcgactccctgcggaacaaggtgtactggtatcagcagaagcccggccaggcccctgtgctggtcatctacaagaacaaccggccctccggcatccccgagagattctctggctccaactccggcaacaccgccaccctgacaatctctggcacacaggccgaggacgaggccgactactactgccagtcctacgacggccagaaatcactggtgttcggcggaggcaccaagctgacagtgctg

SEQ ID NO: 199 - protein, 211 aa, Homo Sapien
SYELTQPPSVSVAPGQTARISCSGDSLRNKVYWYQQKPGQAPVLVIYKNNRPSGIPERFSGSNSGNTATLTISGTQAEDEADYYCQSYDGQKSLVFGGGTKLTVLGQPKAAPSVTLFPPSSEELQANKATLVCLISDFYPGAVTVAWKADSSPVKAGVETTTPSKQSNNKYAASSYLSLTPEQWKSHRSYSCQVTHEGSTVEKTVAPTECS

SEQ ID NO: 200 - DNA, 633 bp, Homo Sapien
tcttacgagctgacccagcccccttccgtgtctgtggctcctggccagaccgccagaatctcttgctccggcgactccctgcggaacaaggtgtactggtatcagcagaagcccggccaggcccctgtgctggtcatctacaagaacaaccggccctccggcatccccgagagattctctggctccaactccggcaacaccgccaccctgacaatctctggcacacaggccgaggacgaggccgactactactgccagtcctacgacggccagaaatcactggtgttcggcggaggcaccaagctgacagtgctgggacagcctaaggctgcccccagcgtgaccctgttcccccccagcagcgaggagctgcaggccaacaaggccaccctggtgtgcctgatcagcgacttctacccaggcgccgtgaccgtggcctggaaggccgacagcagccccgtgaaggccggcgtggagaccaccacccccagcaagcagagcaacaacaagtacgccgccagcagctacctgagcctgacccccgagcagtggaagagccacaggtcctacagctgccaggtgacccacgagggcagcaccgtggaaaagaccgtggccccaaccgagtgcagc

SEQ ID NO: 201 - protein, 707 aa, Homo Sapien; identical to SEQ ID NO: 164

SEQ ID NO: 202 - DNA, 2121 bp, Homo Sapien; identical to SEQ ID NO: 196

SEQ ID NO: 203 - protein, 105 aa, Homo Sapien
SYELTQPLSVSVALGQTARITCSGDSLRNKVYWYQQKPGQAPVLVIYKNNRPSGIPERFSGSNSGNTATLTISRAQAGDEADYYCQSYDGQKSLVFGGGTKLTVL

SEQ ID NO: 204 - DNA, 315 bp, Homo Sapien
agctacgagctgactcagcccctgagcgtgtcagtggctctgggccagaccgctagaatcacctgtagcggcgatagcctgagaaacaaggtctactggtatcagcagaagcccggccaggcccctgtgctggtcatctataagaacaataggcctagcggcatccccgagcggtttagcggctctaatagcggcaacaccgctaccctgactattagtagggctcaggccggcgacgaggccgactactactgtcagtcctacgacggccagaagtcactggtctttggcggcggaactaagctgaccgtgctg

SEQ ID NO: 205 - protein, 211 aa, Homo Sapien
SYELTQPLSVSVALGQTARITCSGDSLRNKVYWYQQKPGQAPVLVIYKNNRPSGIPERFSGSNSGNTATLTISRAQAGDEADYYCQSYDGQKSLVFGGGTKLTVLGQPKAAPSVTLFPPSSEELQANKATLVCLISDFYPGAVTVAWKADSSPVKAGVETTTPSKQSNNKYAASSYLSLTPEQWKSHRSYSCQVTHEGSTVEKTVAPTECS

SEQ ID NO: 206 - DNA, 633 bp, Homo Sapien
agctacgagctgactcagcccctgagcgtgtcagtggctctgggccagaccgctagaatcacctgtagcggcgatagcctgagaaacaaggtctactggtatcagcagaagcccggccaggcccctgtgctggtcatctataagaacaataggcctagcggcatccccgagcggtttagcggctctaatagcggcaacaccgctaccctgactattagtagggctcaggccggcgacgaggccgactactactgtcagtcctacgacggccagaagtcactggtctttggcggcggaactaagctgaccgtgctgggacagcctaaggctgcccccagcgtgaccctgttcccccccagcagcgaggagctgcaggccaacaaggccaccctggtgtgcctgatcagcgacttctacccaggcgccgtgaccgtggcctggaaggccgacagcagccccgtgaaggccggcgtggagaccaccacccccagcaagcagagcaacaacaagtacgccgccagcagctacctgagcctgacccccgagcagtggaagagccacaggtcctacagctgccaggtgacccacgagggcagcaccgtggaaaagaccgtggccccaaccgagtgcagc

SEQ ID NO: 207 - protein, 707 aa, Homo Sapien
EVQLLESGGGLVQPGGSLRLSCAASGFTFSDYVINWVRQAPGKGLEWVSGISWSGVNTHYADSVKGRFTISRDNSKNTLYLQMNSLRAEDTAVYYCARLGATANNIRYKFMDVWGQGTLVTVSSASTKGPSVFPLAPSSKSTSGGTAALGCLVKDYFPEPVTVSWNSGALTSGVHTFPAVLQSSGLYSLSSVVTVPSSSLGTQTYICNVNHKPSNTKVDKRVEPKSCDKTHTCPPCPAPEAAGGPSVFLFPPKPKDTLMISRTPEVTCVVVDVSHEDPEVKFNWYVDGVEVHNAKTKPREEQYNSTYRVVSVLTVLHQDWLNGKEYKCKVSNKALPAPIEKTISKAKGQPREPQVYTLPPSREEMTKNQVSLTCLVKGFYPSDIAVEWESNGQPENNYKTTPPVLDSDGSFFLYSKLTVDKSRWQQGNVFSCSVMHEALHNHYTQKSLSLSPGKGGSGGSDIVLTQSPATLSLSPGERATLSCRASQFIGSRYLAWYQQKPGQAPRLLIYGASNRATGVPARFSGSGSGTDFTLTISSLEPEDFATYYCQQYYDYPQTFGQGTKVEIKGGGGSGGGGSGGGGSGGGGSQVQLKESGPALVKPTQTLTLTCTFSGFSLSNRGGGVGWIRQPPGKALEWLAWIDWDDDKSYSTSLKTRLTISKDTSKNQVVLTMTNMDPVDTATYYCARMHLPLVFDSWGQGTLVTVSS

SEQ ID NO: 208 - DNA, 2121 bp, Homo Sapien
gaggtgcagctgctggaatcaggcggaggactggtgcagcctggcggatcactgagactgagctgtgccgctagtggcttcacctttagcgactatgtgattaactgggtccgacaggcccctggcaagggactggaatgggtgtcaggcattagttggagcggcgtgaacactcactacgccgatagcgtgaagggccggttcactattagccgggataactctaagaacaccctgtacctgcagatgaatagcctgagagccgaggacaccgccgtctactactgcgctagactgggcgctaccgctaacaacatccgctataagttcatggacgtgtggggccagggcaccctggtcacagtgtcttcagctagcactaagggcccctcagtgttccccctggcccctagctctaagtctactagcggtggcaccgccgctctgggctgcctggtcaaggactacttccccgagcccgtgaccgtgtcttggaatagcggcgctctgactagcggagtgcacaccttccccgccgtgctgcagtctagcggcctgtatagcctgtctagcgtcgtgaccgtgcctagctctagcctgggcactcagacctatatctgtaacgtgaaccacaagcctagtaacactaaggtggacaagcgggtggaacctaagtcttgcgataagactcacacctgtcccccctgccctgccccagaagctgctggcggacctagcgtgttcctgttcccacctaagcctaaagacaccctgatgattagtaggacccccgaagtgacctgcgtggtggtggacgtcagccacgaggaccctgaagtgaagttcaattggtatgtggacggcgtggaagtgcacaacgctaagactaagcctagagaggaacagtataactccacctatagggtggtgtcagtgctgaccgtgctgcaccaggactggctgaacggcaaagagtataagtgtaaagtctctaacaaggccctgcctgcccctatcgaaaagactatctctaaggctaagggccagcctagagaaccccaggtctacaccctgccccctagtagagaagagatgactaagaatcaggtgtccctgacctgtctggtcaagggcttctaccctagcgatatcgccgtggagtgggagtctaacggccagcccgagaacaactataagactaccccccctgtgctggatagcgacggctctttcttcctgtactctaaactgaccgtggacaagtctaggtggcagcagggcaacgtgttcagctgtagcgtgatgcacgaggccctgcacaatcactacactcagaagtcactgagcctgagtcccggcaagggcggctcaggcggtagcgatatcgtgctgactcagtcacccgctaccctgagtctgagccctggcgagcgggctacactgagctgtagagctagtcagtttatcggctcacgctacctggcctggtatcagcagaagcccggccaggcccctagactgctgatctacggcgctagtaatagagctaccggcgtgcccgctaggtttagcggctcaggatcaggcaccgactttaccctgactattagtagcctggaacccgaggacttcgctacctactactgtcagcagtactacgactaccctcagaccttcggccagggaactaaggtcgagattaagggcggtggcggtagcggcggaggcggatcaggtggtggtggtagtggcggcggaggtagtcaggtccagctgaaagagtcaggccctgccctggtcaagcctactcagaccctgaccctgacctgcacttttagcggctttagcctgagtaatagaggcggcggagtgggctggattagacagcctccaggcaaagccctggagtggctggcctggatcgactgggacgacgataagtcctactccactagcctgaaaactaggctgacaatcagcaaggacactagtaaaaaccaggtggtgctgactatgactaatatggaccccgtggacaccgctacctattattgcgctagaatgcacctcccactggtgttcgatagctggggtcagggaactctggtcacagtcagtagc

SEQ ID NO: 209 - protein, 585 aa, Homo Sapien [sequence omitted]

SEQ ID NO: 210 - protein, 585 aa, Homo Sapien
DAHKSEVAHRFKDLGEENFKALVLIAFAQYLQQSPFEDHVKLVNEVTEFAKTCVADESAENCDKSLHTLFGDKLCTVATLRETYGEMADCCAKQEPERNECFLQHKDDNPNLPRLVRPEVDVMCTAFHDNEETFLKKYLYEIARRHPYFYAPELLFFAKRYKAAFTECCQAADKAACLLPKLDELRDEGKASSAKQRLKCASLQKFGERAFKAWAVARLSQRFPKAEFAEVSKLVTDLTKVHTECCHGDLLECADDRADLAKYICENQDSISSKLKECCEKPLLEKSHCIAEVENDEMPADLPSLAADFVESKDVCKNYAEAKDVFLGMFLYEYARRHPDYSVVLLLRLAKTYETTLEKCCAAADPHECYAKVFDEFKPLVEEPQNLIKQNCELFEQLGEYKFQNALLVRYTKKVPQVSTPTLVEVSRNLGKVGSKCCKHPEAKRMPCAEDYLSVVLNQLCVLHEKTPVSDRVTKCCTESLVNRRPCFSALEVDETYVPKEFQAETFTFHADICTLSEKERQIKKQTALVELVKHKPKATKEQLKAVMDDFAAFVEKCCKADDKETCFAEEGKKLVAASQAALGL

SEQ ID NO: 211 - protein, 211 aa, Homo Sapien; identical to SEQ ID NO: 16

SEQ ID NO: 212 - DNA, 633 bp, Homo Sapien
gatatcgaactgacccagccgccttcagtgagcgttgcaccaggtcagaccgcgcgtatctcgtgtagcggcgattctcttcgtaataaggtttattggtaccagcagaaacccgggcaggcgccagttcttgtgatttataagaataatcgtccctcaggcatcccggaacgctttagcggatccaacagcggcaacaccgcgaccctgaccattagcggcactcaggcggaagacgaagcggattattattgccagtcttatgatggtcagaagtctcttgtgtttggcggcggcacgaagcttaccgtgctgggccagcccaaagccgcccctagcgtgaccctgttcccccccagcagcgaggaactgcaggccaacaaggccaccctggtctgcctgatcagcgacttctaccctggcgccgtgaccgtggcctggaaggccgacagcagccccgtgaaggccggcgtggagacaaccacccccagcaagcagagcaacaacaagtacgccgccagcagctacctgagcctgacccccgagcagtggaagagccacagaagctacagctgccaggtcacccacgagggcagcaccgtggagaaaaccgtggcccccaccgagtgcagc

SEQ ID NO: 213 - protein, 822 aa, Homo Sapien
QVQLVESGGGLVQPGGSLRLSCAASGFTFSDYVINWVRQAPGKGLEWVSGISWSGVNTHYADSVKGRFTISRDNSKNTLYLQMNSLRAEDTAVYYCARLGATANNIRYKFMDVWGQGTLVTVSSASTKGPSVFPLAPSSKSTSGGTAALGCLVKDYFPEPVTVSWNSGALTSGVHTFPAVLQSSGLYSLSSVVTVPSSSLGTQTYICNVNHKPSNTKVDKKVEPKSCDKTHTEAHKSEIAHRYNDLGEQHFKGLVLIAFSQYLQKCSYDEHAKLVQEVTDFAKTCVADESAANCDKSLHTLFGDKLCAIPNLRENYGELADCCTKQEPERNECFLQHKDDNPSLPPFERPEAEAMCTSFKENPTTFMGHYLHEVARRHPYFYAPELLYYAEQYNEILTQCCAEADKESCLTPKLDGVKEKALVSSVRQRMKCSSMQKFGERAFKAWAVARLSQTFPNADFAEITKLATDLTKVNKECCHGDLLECADDRAELAKYMCENQATISSKLQTCCDKPLLKKAHCLSEVEHDTMPADLPAIAADFVEDQEVCKNYAEAKDVFLGTFLYEYSRRHPDYSVSLLLRLAKKYEATLEKCCAEANPPACYGTVLAEFQPLVEEPKNLVKTNCDLYEKLGEYGFQNAILVRYTQKAPQVSTPTLVEAARNLGRVGTKCCTLPEDQRLPCVEDYLSAILNRVCLLHEKTPVSEHVTKCCSGSLVERRPCFSALTVDETYVPKEFKAETFTFHSDICTLPEKEKQIKKQTALAELVKHKPKATAEQLKTVMDDFAQFLDTCCKAADKDTCFSTEGPNLVTRCKDALAHHHHHH

SEQ ID NO: 214 - DNA, 2466 bp, Homo Sapien
caggtgcaattggtggaaagcggcggcggcctggtgcaaccgggcggcagcctgcgtctgagctgcgcggcctccggatttaccttttctgattatgttattaattgggtgcgccaagcccctgggaagggtctcgagtgggtgagcggtatttcttggtctggtgttaatactcattatgctgattctgttaagggtcgttttaccatttcacgtgataattcgaaaaacaccctgtatctgcaaatgaacagcctgcgtgcggaagatacggccgtgtattattgcgcgcgtcttggtgctactgctaataatattcgttataagtttatggatgtttggggccaaggcaccctggtgacggttagctcagctagcaccaagggccccagcgtgttccccctggcccccagcagcaagagcacctctggcggcactgctgccctgggctgcctggtcaaggactacttccccgagcccgtgacagtgtcctggaacagcggagccctgacctccggcgtgcacaccttccccgccgtgctgcagagcagcggcctgtacagcctgagcagcgtggtcacagtgcccagcagcagcctgggcacccagacctacatctgcaacgtgaaccacaagcccagcaacaccaaggtcgacaagaaggtggagcccaagagctgcgacaagacccacaccgaggcccacaagagcgagatcgcccaccggtacaacgacctgggagagcagcatttcaagggactggtgctgatcgccttcagccagtacctgcagaagtgcagctacgacgagcacgccaagctggtgcaggaagtgaccgacttcgccaagacctgcgtggccgacgagagcgccgccaactgcgacaagagcctgcacaccctgttcggcgacaagctgtgcgccatccccaacctgcgggagaactacggcgagctggccgactgctgcaccaagcaggaacccgagcggaacgagtgcttcctgcagcacaaggacgacaaccccagcctgccccccttcgagaggcctgaggccgaggccatgtgcaccagcttcaaagagaaccccaccaccttcatgggccactacctgcacgaggtggccaggcggcacccctacttctacgcccccgagctgctgtactacgccgagcagtacaacgagatcctgacccagtgctgcgccgaggccgacaaagagagctgcctgacccccaagctggacggcgtgaaagaaaaggccctggtgtccagcgtgcggcagcggatgaagtgcagcagcatgcagaagttcggcgagcgggccttcaaggcctgggccgtggcccggctgtcccagaccttccccaacgccgatttcgccgagatcaccaagctggccaccgacctgaccaaggtgaacaaagagtgctgtcacggcgacctgctggaatgcgccgacgaccgggccgagctggccaagtacatgtgcgagaaccaggccaccatcagctccaaactgcagacctgctgtgataagcccctgctgaagaaggcccactgcctgagcgaggtggagcacgacaccatgcccgccgacctgcccgccattgccgccgacttcgtggaggaccaggaagtgtgcaagaattacgccgaggccaaggacgtgttcctgggcaccttcctgtacgagtacagcagacggcaccccgactacagcgtgagcctgctgctgaggctggccaagaagtacgaggccaccctggaaaagtgttgcgccgaagccaacccccctgcctgctacggcaccgtgctggccgagttccagcccctggtggaggaacccaagaacctggtgaaaaccaactgcgatctgtacgagaagctgggcgagtacggcttccagaacgccatcctggtccggtacacccagaaagccccccaggtgtccacccccacactggtggaggccgccaggaacctgggcagagtcggcaccaagtgctgcaccctgcccgaggatcagaggctgccctgtgtcgaggactacctgagcgccatcctgaacagagtgtgcctgctgcacgagaaaacccccgtgagcgagcacgtgaccaagtgttgcagcggcagcctggtggagcggaggccctgcttcagcgccctgaccgtggacgagacatacgtgcccaaagagttcaaggccgagacattcaccttccacagcgacatctgtaccctgcctgagaaagagaagcagatcaagaagcagaccgccctggccgaactggtgaagcacaagcccaaggccaccgccgagcagctgaaaaccgtgatggacgacttcgcccagttcctggacacctgctgcaaggccgccgacaaggacacctgtttcagcaccgagggccccaacctggtgacccggtgcaaggacgccctggcccaccatcatcaccatcac

SEQ ID NO: 215 - protein, 211 aa, Homo Sapien; identical to SEQ ID NO: 16

SEQ ID NO: 216 - DNA, 633 bp, Homo Sapien; identical to SEQ ID NO: 167

SEQ ID NO: 217 - protein, 822 aa, Homo Sapien
QVQLVESGGGLVQPGGSLRLSCAASGFTFSDYVINWVRQAPGKGLEWVSGISWSGVNTHYADSVKGRFTISRDNSKNTLYLQMNSLRAEDTAVYYCARLGATANNIRYKFMDVWGQGTLVTVSSASTKGPSVFPLAPSSKSTSGGTAALGCLVKDYFPEPVTVSWNSGALTSGVHTFPAVLQSSGLYSLSSVVTVPSSSLGTQTYICNVNHKPSNTKVDKKVEPKSCDKTHTEAHKSEIAHRYNDLGEQHFKGLVLIAFSQYLQKSSYDEHAKLVQEVTDFAKTCVADESAANCDKSLHTLFGDKLCAIPNLRENYGELADCCTKQEPERNECFLQHKDDNPSLPPFERPEAEAMCTSFKENPTTFMGHYLHEVARRHPYFYAPELLYYAEQYNEILTQCCAEADKESCLTPKLDGVKEKALVSSVRQRMKCSSMQKFGERAFKAWAVARLSQTFPNADFAEITKLATDLTKVNKECCHGDLLECADDRAELAKYMCENQATISSKLQTCCDKPLLKKAHCLSEVEHDTMPADLPAIAADFVEDQEVCKNYAEAKDVFLGTFLYEYSRRHPDYSVSLLLRLAKKYEATLEKCCAEANPPACYGTVLAEFQPLVEEPKNLVKTNCDLYEKLGEYGFQNAILVRYTQKAPQVSTPTLVEAARNLGRVGTKCCTLPEDQRLPCVEDYLSAILNRVCLLHEKTPVSEHVTKCCSGSLVERRPCFSALTVDETYVPKEFKAETFTFHSDICTLPEKEKQIKKQTALAELVKHKPKATAEQLKTVMDDFAQFLDTCCKAADKDTCFSTEGPNLVTRSKDALAHHHHHH

SEQ ID NO: 218 - DNA, 2466 bp, Homo Sapien
caggtgcaattggtcgagtctggcggaggactggtgcagcctggtggcagcctgagactgagctgcgccgccagcggcttcaccttcagcgactacgtgatcaactgggtgcgacaggcccctggaaagggcctggaatgggtgtccggcatctcttggtctggcgtgaacacccactacgccgacagcgtgaagggccggttcaccatcagccgggacaacagcaagaacaccctgtacctgcagatgaacagcctgagagccgaggacaccgccgtgtactactgtgccagactgggcgccaccgccaacaacatccggtacaagttcatggacgtgtggggccagggcacactggtgaccgtcagctcagctagcaccaagggccccagcgtgttccccctggcccccagcagcaagagcacctctggcggcactgctgccctgggctgcctggtcaaggactacttccccgagcccgtgacagtgtcctggaacagcggagccctgacctccggcgtgcacaccttccccgccgtgctgcagagcagcggcctgtacagcctgagcagcgtggtcacagtgcccagcagcagcctgggcacccagacctacatctgcaacgtgaaccacaagcccagcaacaccaaggtcgacaagaaggtggagcccaagagctgcgacaagacccacaccgaggcccacaagagcgagatcgcccaccggtacaacgacctgggagagcagcatttcaagggactggtgctgatcgccttcagccagtacctgcagaagtccagctacgacgagcacgccaagctggtgcaggaagtgaccgacttcgccaagacctgcgtggccgacgagagcgccgccaactgcgacaagagcctgcacaccctgttcggcgacaagctgtgcgccatccccaacctgcgggagaactacggcgagctggccgactgctgcaccaagcaggaacccgagcggaacgagtgcttcctgcagcacaaggacgacaaccccagcctgccccccttcgagaggcctgaggccgaggccatgtgcaccagcttcaaagagaaccccaccaccttcatgggccactacctgcacgaggtggccaggcggcacccctacttctacgcccccgagctgctgtactacgccgagcagtacaacgagatcctgacccagtgctgcgccgaggccgacaaagagagctgcctgacccccaagctggacggcgtgaaagaaaaggccctggtgtccagcgtgcggcagcggatgaagtgcagcagcatgcagaagttcggcgagcgggccttcaaggcctgggccgtggcccggctgtcccagaccttccccaacgccgatttcgccgagatcaccaagctggccaccgacctgaccaaggtgaacaaagagtgctgtcacggcgacctgctggaatgcgccgacgaccgggccgagctggccaagtacatgtgcgagaaccaggccaccatcagctccaaactgcagacctgctgtgataagcccctgctgaagaaggcccactgcctgagcgaggtggagcacgacaccatgcccgccgacctgcccgccattgccgccgacttcgtggaggaccaggaagtgtgcaagaattacgccgaggccaaggacgtgttcctgggcaccttcctgtacgagtacagcagacggcaccccgactacagcgtgagcctgctgctgaggctggccaagaagtacgaggccaccctggaaaagtgttgcgccgaagccaacccccctgcctgctacggcaccgtgctggccgagttccagcccctggtggaggaacccaagaacctggtgaaaaccaactgcgatctgtacgagaagctgggcgagtacggcttccagaacgccatcctggtccggtacacccagaaagccccccaggtgtccacccccacactggtggaggccgccaggaacctgggcagagtcggcaccaagtgctgcaccctgcccgaggatcagaggctgccctgtgtcgaggactacctgagcgccatcctgaacagagtgtgcctgctgcacgagaaaacccccgtgagcgagcacgtgaccaagtgttgcagcggcagcctggtggagcggaggccctgcttcagcgccctgaccgtggacgagacatacgtgcccaaagagttcaaggccgagacattcaccttccacagcgacatctgtaccctgcctgagaaagagaagcagatcaagaagcagaccgccctggccgaactggtgaagcacaagcccaaggccaccgccgagcagctgaaaaccgtgatggacgacttcgcccagttcctggacacctgctgcaaggccgccgacaaggacacctgtttcagcaccgagggccccaacctggtgacccggtccaaggacgccctggcccaccatcatcaccatcac

SEQ ID NO: 219 - protein, 211 aa, Homo Sapien; identical to SEQ ID NO: 16

SEQ ID NO: 220 - DNA, 633 bp, Homo Sapien; identical to SEQ ID NO: 167

SEQ ID NO: 221 - protein, 817 aa, Homo Sapien
QVQLVESGGGLVQPGGSLRLSCAASGFTFSDYVINWVRQAPGKGLEWVSGISWSGVNTHYADSVKGRFTISRDNSKNTLYLQMNSLRAEDTAVYYCARLGATANNIRYKFMDVWGQGTLVTVSSASTKGPSVFPLAPSSKSTSGGTAALGCLVKDYFPEPVTVSWNSGALTSGVHTFPAVLQSSGLYSLSSVVTVPSSSLGTQTYICNVNHKPSNTKVDKKVEPKSCDKTHTDAHKSEVAHRFKDLGEENFKALVLIAFAQYLQQSPFEDHVKLVNEVTEFAKTCVADESAENCDKSLHTLFGDKLCTVATLRETYGEMADCCAKQEPERNECFLQHKDDNPNLPRLVRPEVDVMCTAFHDNEETFLKKYLYEIARRHPYFYAPELLFFAKRYKAAFTECCQAADKAACLLPKLDELRDEGKASSAKQRLKCASLQKFGERAFKAWAVARLSQRFPKAEFAEVSKLVTDLTKVHTECCHGDLLECADDRADLAKYICENQDSISSKLKECCEKPLLEKSHCIAEVENDEMPADLPSLAADFVESKDVCKNYAEAKDVFLGMFLYEYARRHPDYSVVLLLRLAKTYETTLEKCCAAADPHECYAKVFDEFKPLVEEPQNLIKQNCELFEQLGEYKFQNALLVRYTKKVPQVSTPTLVEVSRNLGKVGSKCCKHPEAKRMPCAEDYLSVVLNQLCVLHEKTPVSDRVTKCCTESLVNRRPCFSALEVDETYVPKEFNAETFTFHADICTLSEKERQIKKQTALVELVKHKPKATKEQLKAVMDDFAAFVEKCCKADDKETCFAEEGKKLVAASQAALGL

SEQ ID NO: 222 - DNA, 2451 bp, Homo Sapien
caggtgcaattggtcgagtctggcggaggactggtgcagcctggtggcagcctgagactgagctgcgccgccagcggcttcaccttcagcgactacgtgatcaactgggtgcgacaggcccctggaaagggcctggaatgggtgtccggcatctcttggtctggcgtgaacacccactacgccgacagcgtgaagggccggttcaccatcagccgggacaacagcaagaacaccctgtacctgcagatgaacagcctgagagccgaggacaccgccgtgtactactgtgccagactgggcgccaccgccaacaacatccggtacaagttcatggacgtgtggggccagggcacactggtgaccgtcagctcagctagcaccaagggccccagcgtgttccccctggccccctccagcaagtccacaagcggtggcacagcagctctgggttgcctggtgaaggactacttccccgagcccgtgacagtgtcctggaactctggcgccctgacctccggcgtgcacaccttccccgccgtgctgcagagcagcggcctgtacagcctgagcagcgtggtgacagtccccagcagcagcttgggcacccagacctacatctgcaacgtgaaccacaagcccagcaacaccaaggtggacaagaaggtggagcccaagagctgcgacaagacccacaccgacgcccacaagagcgaggtggcccaccggttcaaggacctgggcgaggaaaacttcaaggccctggtgctgatcgccttcgcccagtacctgcagcagagccccttcgaagatcacgtaaagttagtcaacgaggttacggaattcgcaaagacatgcgttgctgacgaatccgctgagaattgtgacaagagtttgcacactttattcggagataagttgtgtactgtagctactttgagagagacttacggtgaaatggctgactgctgtgcaaaacaggaaccagaacgtaacgaatgtttccttcagcataaggatgataaccctaaccttccaaggcttgttaggccagaagtcgacgtgatgtgcaccgccttccatgataatgaagagacttttcttaaaaagtacctatacgagattgcaaggcgtcatccatatttttacgccccagagctgttgtttttcgcaaagagatacaaagctgcatttactgagtgttgccaagctgccgacaaggccgcttgtttgctaccaaagttggacgaattgagagacgagggtaaggcatcatctgccaagcagagattaaaatgtgcatctttgcaaaaatttggagagagagcttttaaggcatgggctgttgcccgactaagccaaagattcccaaaagccgaatttgctgaagtatccaagctggtgactgatttgactaaagtacatacagaatgttgccatggcgaccttttagaatgtgctgatgacagagcagatttggctaagtatatctgcgaaaatcaagattcaatcagctctaagctgaaggaatgttgcgagaaaccactgttagaaaaatcgcattgtattgctgaagttgaaaatgatgagatgcctgctgacttgccttctcttgccgctgattttgttgagtcgaaggatgtctgtaagaattatgctgaagctaaagacgttttcctgggtatgttcttatatgagtacgcaagacgtcacccagattactctgtggttctgctactgagattggctaaaacatacgagacaacgctggagaagtgctgtgctgccgctgaccctcatgagtgctatgcaaaggtttttgatgaattcaaaccattggttgaagagcctcaaaacttgataaagcagaactgtgagctgtttgagcaattgggtgagtataagttccaaaatgccctgttggtgagatatacaaaaaaggtaccccaagtttcaacgcccactttagttgaagtgtccagaaatcttggtaaagtgggtagcaaatgttgcaagcatccagaagccaagcgaatgccctgtgctgaggattatctgtccgtcgtgttgaaccaattgtgcgtattacacgaaaaaaccccagtctctgatagagtcaccaaatgttgcactgagtcactagttaatagaaggccttgtttttccgctttggaagttgatgaaacctacgtgcctaaggaatttaacgctgagacctttacctttcacgctgacatttgtactttgagtgaaaaagagcgtcaaatcaaaaagcaaaccgctcttgttgaattggtgaaacacaagcctaaggctacgaaggagcagcttaaagccgtcatggacgatttcgccgcatttgttgaaaaatgctgtaaagctgatgacaaggaaacatgtttcgctgaagagggaaagaaattggttgcggccagtcaggccgcacttggtttg

SEQ ID NO: 223 - protein, 213 aa, Homo Sapien
DIELTQPPSVSVAPGQTARISCSGDNIGSKYVHWYQQKPGQAPVLVIYGDSNRPSGIPERFSGSNSGNTATLTISGTQAEDEADYYCTRTSTPISGVFGGGTKLTVLGQPKAAPSVTLFPPSSEELQANKATLVCLISDFYPGAVTVAWKADSSPVKAGVETTTPSKQSNNKYAASSYLSLTPEQWKSHRSYSCQVTHEGSTVEKTVAPTECS

SEQ ID NO: 224 - DNA, 639 bp, Homo Sapien
gacatcgagctgacccagccccccagcgtgtctgtggcccctggccagaccgcccggatcagctgcagcggcgacaacatcggcagcaaatacgtgcactggtatcagcagaagcccggccaggcccccgtgctggtcatctacggcgacagcaaccggcccagcggcatccccgagcggttcagcggcagcaacagcggcaacaccgccaccctgaccatcagcggcacccaggccgaggacgaggccgactactactgcacccggaccagcacccccatctccggcgtgtttggcggcggaacaaagctgaccgtgctgggccagcccaaagccgcccctagcgtgaccctgttcccccccagcagcgaggaactgcaggccaacaaggccaccctggtctgcctgatcagcgacttctaccctggcgccgtgaccgtggcctggaaggccgacagcagccccgtgaaggccggcgtggagacaaccacccccagcaagcagagcaacaacaagtacgccgccagcagctacctgagcctgacccccgagcagtggaagagccacagaagctacagctgccaggtcacccacgagggcagcaccgtggagaaaaccgtggcccccaccgagtgcagc

SEQ ID NO: 225 - protein, 817 aa, Homo Sapien
QVQLVESGGGLVQPGGSLRLSCAASGFTFSVNGMHWVRQAPGKGLEWVSVIDGMGHTYYADSVKGRFTISRDNSKNTLYLQMNSLRAEDTAVYYCARYDYIKYGAFDPWGQGTLVTVSSASTKGPSVFPLAPSSKSTSGGTAALGCLVKDYFPEPVTVSWNSGALTSGVHTFPAVLQSSGLYSLSSVVTVPSSSLGTQTYICNVNHKPSNTKVDKKVEPKSCDKTHTEAHKSEIAHRYNDLGEQHFKGLVLIAFSQYLQKCSYDEHAKLVQEVTDFAKTCVADESAANCDKSLHTLFGDKLCAIPNLRENYGELADCCTKQEPERNECFLQHKDDNPSLPPFERPEAEAMCTSFKENPTTFMGHYLHEVARRHPYFYAPELLYYAEQYNEILTQCCAEADKESCLTPKLDGVKEKALVSSVRQRMKCSSMQKFGERAFKAWAVARLSQTFPNADFAEITKLATDLTKVNKECCHGDLLECADDRAELAKYMCENQATISSKLQTCCDKPLLKKAHCLSEVEHDTMPADLPAIAADFVEDQEVCKNYAEAKDVFLGTFLYEYSRRHPDYSVSLLLRLAKKYEATLEKCCAEANPPACYGTVLAEFQPLVEEPKNLVKTNCDLYEKLGEYGFQNAILVRYTQKAPQVSTPTLVEAARNLGRVGTKCCTLPEDQRLPCVEDYLSAILNRVCLLHEKTPVSEHVTKCCSGSLVERRPCFSALTVDETYVPKEFKAETFTFHSDICTLPEKEKQIKKQTALAELVKHKPKATAEQLKTVMDDFAQFLDTCCKAADKDTCFSTEGPNLVTRCKDALAHHHHHH

SEQ ID NO: 226 - DNA, 2451 bp, Homo Sapien
caggtgcagctggtcgagtctggcgggggactggtccagcctggcggcagcctgagactgagctgcgccgccagcggcttcaccttcagcgtgaacggcatgcactgggtccgccaggcaccaggcaagggcctggaatgggtgtccgtgatcgacggcatgggccacacctactacgccgacagcgtgaagggccggttcaccatcagccgggacaacagcaagaacaccctgtacctgcagatgaacagcctgcgggccgaggacaccgccgtgtactactgcgccagatacgactacatcaagtacggcgccttcgacccctggggccagggcacactggtcaccgtgtccagcgctagcaccaagggccccagcgtgttccccctggcccccagcagcaagagcacctctggcggcactgctgccctgggctgcctggtcaaggactacttccccgagcccgtgacagtgtcctggaacagcggagccctgacctccggcgtgcacaccttccccgccgtgctgcagagcagcggcctgtacagcctgagcagcgtggtcacagtgcccagcagcagcctgggcacccagacctacatctgcaacgtgaaccacaagcccagcaacaccaaggtggacaagaaggtggagcccaagagctgcgacaagacccacaccgaggcccacaagagcgagatcgcccaccggtacaacgacctgggagagcagcatttcaagggactggtgctgatcgccttcagccagtacctgcagaagtgcagctacgacgagcacgccaagctggtgcaggaagtgaccgacttcgccaagacctgcgtggccgacgagagcgccgccaactgcgacaagagcctgcacaccctgttcggcgacaagctgtgcgccatccccaacctgcgggagaactacggcgagctggccgactgctgcaccaagcaggaacccgagcggaacgagtgcttcctgcagcacaaggacgacaaccccagcctgccccccttcgagaggcctgaggccgaggccatgtgcaccagcttcaaagagaaccccaccaccttcatgggccactacctgcacgaggtggccaggcggcacccctacttctacgcccccgagctgctgtactacgccgagcagtacaacgagatcctgacccagtgctgcgccgaggccgacaaagagagctgcctgacccccaagctggacggcgtgaaagaaaaggccctggtgtccagcgtgcggcagcggatgaagtgcagcagcatgcagaagttcggcgagcgggccttcaaggcctgggccgtggcccggctgtcccagaccttccccaacgccgatttcgccgagatcaccaagctggccaccgacctgaccaaggtgaacaaagagtgctgtcacggcgacctgctggaatgcgccgacgaccgggccgagctggccaagtacatgtgcgagaaccaggccaccatcagctccaaactgcagacctgctgtgataagcccctgctgaagaaggcccactgcctgagcgaggtggagcacgacaccatgcccgccgacctgcccgccattgccgccgacttcgtggaggaccaggaagtgtgcaagaattacgccgaggccaaggacgtgttcctgggcaccttcctgtacgagtacagcagacggcaccccgactacagcgtgagcctgctgctgaggctggccaagaagtacgaggccaccctggaaaagtgttgcgccgaagccaacccccctgcctgctacggcaccgtgctggccgagttccagcccctggtggaggaacccaagaacctggtgaaaaccaactgcgatctgtacgagaagctgggcgagtacggcttccagaacgccatcctggtccggtacacccagaaagccccccaggtgtccacccccacactggtggaggccgccaggaacctgggcagagtcggcaccaagtgctgcaccctgcccgaggatcagaggctgccctgtgtcgaggactacctgagcgccatcctgaacagagtgtgcctgctgcacgagaaaacccccgtgagcgagcacgtgaccaagtgttgcagcggcagcctggtggagcggaggccctgcttcagcgccctgaccgtggacgagacatacgtgcccaaagagttcaaggccgagacattcaccttccacagcgacatctgtaccctgcctgagaaagagaagcagatcaagaagcagaccgccctggccgaactggtgaagcacaagcccaaggccaccgccgagcagctgaaaaccgtgatggacgacttcgcccagttcctggacacctgctgcaaggccgccgacaaggacacctgtttcagcaccgagggccccaacctggtgacccggtgcaaggacgccctggcccaccatcatcaccatcac

SEQ ID NO: 227 - protein, 212 aa, Homo Sapien
DIELTQPPSVSVAPGQTARISCSGDNIGSKYVHWYQQKPGQAPVLVIYGDSNRPSGIPERFSGSNSGNTATLTISGTQAEDEADYYCSSYDLARTVFGGGTKLTVLGQPKAAPSVTLFPPSSEELQANKATLVCLISDFYPGAVTVAWKADSSPVKAGVETTTPSKQSNNKYAASSYLSLTPEQWKSHRSYSCQVTHEGSTVEKTVAPTECS

SEQ ID NO: 228 - DNA, 636 bp, Homo Sapien
gacatcgagctgacccagccccccagcgtgtctgtggcccctggccagaccgcccggatcagctgcagcggcgacaacatcggcagcaaatacgtgcactggtatcagcagaagcccggccaggcccccgtgctggtcatctacggcgacagcaaccggcccagcggcatccccgagcggttcagcggcagcaacagcggcaacaccgccaccctgaccatcagcggcacccaggccgaggacgaggccgactactactgcagcagctacgacctggcccggaccgtgtttggcggcggaacaaagctgaccgtgctgggccagcccaaagccgcccctagcgtgaccctgttcccccccagcagcgaggaactgcaggccaacaaggccaccctggtctgcctgatcagcgacttctaccctggcgccgtgaccgtggcctggaaggccgacagcagccccgtgaaggccggcgtggagacaaccacccccagcaagcagagcaacaacaagtacgccgccagcagctacctgagcctgacccccgagcagtggaagagccacagaagctacagctgccaggtcacccacgagggcagcaccgtggagaaaaccgtggcccccaccgagtgcagc

SEQ ID NO: 229 - protein, 818 aa, Homo Sapien
QVQLVESGGGLVQPGGSLRLSCAASGFTFSVNGMHWVRQAPGKGLEWVSNISGSSSFTYYADSVKGRFTISRDNSKNTLYLQMNSLRAEDTAVYYCARYDYIKYGAFDPWGQGTLVTVSSASTKGPSVFPLAPSSKSTSGGTAALGCLVKDYFPEPVTVSWNSGALTSGVHTFPAVLQSSGLYSLSSVVTVPSSSLGTQTYICNVNHKPSNTKVDKKVEPKSCDKTHTEAHKSEIAHRYNDLGEQHFKGLVLIAFSQYLQKCSYDEHAKLVQEVTDFAKTCVADESAANCDKSLHTLFGDKLCAIPNLRENYGELADCCTKQEPERNECFLQHKDDNPSLPPFERPEAEAMCTSFKENPTTFMGHYLHEVARRHPYFYAPELLYYAEQYNEILTQCCAEADKESCLTPKLDGVKEKALVSSVRQRMKCSSMQKFGERAFKAWAVARLSQTFPNADFAEITKLATDLTKVNKECCHGDLLECADDRAELAKYMCENQATISSKLQTCCDKPLLKKAHCLSEVEHDTMPADLPAIAADFVEDQEVCKNYAEAKDVFLGTFLYEYSRRHPDYSVSLLLRLAKKYEATLEKCCAEANPPACYGTVLAEFQPLVEEPKNLVKTNCDLYEKLGEYGFQNAILVRYTQKAPQVSTPTLVEAARNLGRVGTKCCTLPEDQRLPCVEDYLSAILNRVCLLHEKTPVSEHVTKCCSGSLVERRPCFSALTVDETYVPKEFKAETFTFHSDICTLPEKEKQIKKQTALAELVKHKPKATAEQLKTVMDDFAQFLDTCCKAADKDTCFSTEGPNLVTRCKDALAHHHHHH

SEQ ID NO: 230 - DNA, 2454 bp, Homo Sapien
caggtgcagctggtcgagtctggcgggggactggtccagcctggcggcagcctgagactgagctgcgccgccagcggcttcaccttcagcgtgaacggcatgcactgggtccgccaggcaccaggcaagggcctggaatgggtgtccaacatcagcggcagcagcagcttcacctactacgccgacagcgtgaagggccggttcaccatcagccgggacaacagcaagaacaccctgtacctgcagatgaacagcctgcgggccgaggacaccgccgtgtactactgcgccagatacgactacatcaagtacggcgccttcgacccctggggccagggcacactggtcaccgtgtccagcgctagcaccaagggccccagcgtgttccccctggcccccagcagcaagagcacctctggcggcactgctgccctgggctgcctggtcaaggactacttccccgagcccgtgacagtgtcctggaacagcggagccctgacctccggcgtgcacaccttccccgccgtgctgcagagcagcggcctgtacagcctgagcagcgtggtcacagtgcccagcagcagcctgggcacccagacctacatctgcaacgtgaaccacaagcccagcaacaccaaggtggacaagaaggtggagcccaagagctgcgacaagacccacaccgaggcccacaagagcgagatcgcccaccggtacaacgacctgggagagcagcatttcaagggactggtgctgatcgccttcagccagtacctgcagaagtgcagctacgacgagcacgccaagctggtgcaggaagtgaccgacttcgccaagacctgcgtggccgacgagagcgccgccaactgcgacaagagcctgcacaccctgttcggcgacaagctgtgcgccatccccaacctgcgggagaactacggcgagctggccgactgctgcaccaagcaggaacccgagcggaacgagtgcttcctgcagcacaaggacgacaaccccagcctgccccccttcgagaggcctgaggccgaggccatgtgcaccagcttcaaagagaaccccaccaccttcatgggccactacctgcacgaggtggccaggcggcacccctacttctacgcccccgagctgctgtactacgccgagcagtacaacgagatcctgacccagtgctgcgccgaggccgacaaagagagctgcctgacccccaagctggacggcgtgaaagaaaaggccctggtgtccagcgtgcggcagcggatgaagtgcagcagcatgcagaagttcggcgagcgggccttcaaggcctgggccgtggcccggctgtcccagaccttccccaacgccgatttcgccgagatcaccaagctggccaccgacctgaccaaggtgaacaaagagtgctgtcacggcgacctgctggaatgcgccgacgaccgggccgagctggccaagtacatgtgcgagaaccaggccaccatcagctccaaactgcagacctgctgtgataagcccctgctgaagaaggcccactgcctgagcgaggtggagcacgacaccatgcccgccgacctgcccgccattgccgccgacttcgtggaggaccaggaagtgtgcaagaattacgccgaggccaaggacgtgttcctgggcaccttcctgtacgagtacagcagacggcaccccgactacagcgtgagcctgctgctgaggctggccaagaagtacgaggccaccctggaaaagtgttgcgccgaagccaacccccctgcctgctacggcaccgtgctggccgagttccagcccctggtggaggaacccaagaacctggtgaaaaccaactgcgatctgtacgagaagctgggcgagtacggcttccagaacgccatcctggtccggtacacccagaaagccccccaggtgtccacccccacactggtggaggccgccaggaacctgggcagagtcggcaccaagtgctgcaccctgcccgaggatcagaggctgccctgtgtcgaggactacctgagcgccatcctgaacagagtgtgcctgctgcacgagaaaacccccgtgagcgagcacgtgaccaagtgttgcagcggcagcctggtggagcggaggccctgcttcagcgccctgaccgtggacgagacatacgtgcccaaagagttcaaggccgagacattcaccttccacagcgacatctgtaccctgcctgagaaagagaagcagatcaagaagcagaccgccctggccgaactggtgaagcacaagcccaaggccaccgccgagcagctgaaaaccgtgatggacgacttcgcccagttcctggacacctgctgcaaggccgccgacaaggacacctgtttcagcaccgagggccccaacctggtgacccggtgcaaggacgccctggcccaccatcatcaccatcac

SEQ ID NO: 231 - protein, 214 aa, Homo Sapien; identical to SEQ ID NO: 63

SEQ ID NO: 232 - DNA, 642 bp, Homo Sapien
gatatcgaactgacccagccgccttcagtgagcgttgcaccaggtcagaccgcgcgtatctcgtgtagcggcgataatattcgtaagaagtatgtttattggtaccagcagaaacccgggcaggcgccagttcttgtgatttatgaggattctaagcgtccctcaggcatcccggaacgctttagcggatccaacagcggcaacaccgcgaccctgaccattagcggcactcaggcggaagacgaagcggattattattgctctactgctgattctggtattaataatggtgtgtttggcggcggcacgaagcttaccgtgctgggccagcccaaagccgcccctagcgtgaccctgttcccccccagcagcgaggaactgcaggccaacaaggccaccctggtctgcctgatcagcgacttctaccctggcgccgtgaccgtggcctggaaggccgacagcagccccgtgaaggccggcgtggagacaaccacccccagcaagcagagcaacaacaagtacgccgccagcagctacctgagcctgacccccgagcagtggaagagccacagaagctacagctgccaggtcacccacgagggcagcaccgtggagaaaaccgtggcccccaccgagtgcagc

SEQ ID NO: 233 - protein, 821 aa, Homo Sapien
QVQLVESGGGLVQPGGSLRLSCAASGFTFSDYAIHWVRQAPGKGLEWVSGISYSGSSTHYADSVKGRFTISRDNSKNTLYLQMNSLRAEDTAVYYCARGSHGNIMAKRYFDFWGQGTLVTVSSASTKGPSVFPLAPSSKSTSGGTAALGCLVKDYFPEPVTVSWNSGALTSGVHTFPAVLQSSGLYSLSSVVTVPSSSLGTQTYICNVNHKPSNTKVDKKVEPKSCDKTHTEAHKSEIAHRYNDLGEQHFKGLVLIAFSQYLQKCSYDEHAKLVQEVTDFAKTCVADESAANCDKSLHTLFGDKLCAIPNLRENYGELADCCTKQEPERNECFLQHKDDNPSLPPFERPEAEAMCTSFKENPTTFMGHYLHEVARRHPYFYAPELLYYAEQYNEILTQCCAEADKESCLTPKLDGVKEKALVSSVRQRMKCSSMQKFGERAFKAWAVARLSQTFPNADFAEITKLATDLTKVNKECCHGDLLECADDRAELAKYMCENQATISSKLQTCCDKPLLKKAHCLSEVEHDTMPADLPAIAADFVEDQEVCKNYAEAKDVFLGTFLYEYSRRHPDYSVSLLLRLAKKYEATLEKCCAEANPPACYGTVLAEFQPLVEEPKNLVKTNCDLYEKLGEYGFQNAILVRYTQKAPQVSTPTLVEAARNLGRVGTKCCTLPEDQRLPCVEDYLSAILNRVCLLHEKTPVSEHVTKCCSGSLVERRPCFSALTVDETYVPKEFKAETFTFHSDICTLPEKEKQIKKQTALAELVKHKPKATAEQLKTVMDDFAQFLDTCCKAADKDTCFSTEGPNLVTRCKDALAHHHHHH

SEQ ID NO: 234 - DNA, 2463 bp, Homo Sapien
caggtgcaattggtggaaagcggcggcggcctggtgcaaccgggcggcagcctgcgtctgagctgcgcggcctccggatttaccttttctgattatgctattcattgggtgcgccaagcccctgggaagggtctcgagtgggtgagcggtatctcttattctggtagctctacccattatgcggatagcgtgaaaggccgttttaccatttcacgtgataattcgaaaaacaccctgtatctgcaaatgaacagcctgcgtgcggaagatacggccgtgtattattgcgcgcgtggttctcatggtaatattatggctaagcgttattttgatttttggggccaaggcaccctggtgacggttagctcagctagcaccaagggccccagcgtgttccccctggcccccagcagcaagagcacctctggcggcactgctgccctgggctgcctggtcaaggactacttccccgagcccgtgacagtgtcctggaacagcggagccctgacctccggcgtgcacaccttccccgccgtgctgcagagcagcggcctgtacagcctgagcagcgtggtcacagtgcccagcagcagcctgggcacccagacctacatctgcaacgtgaaccacaagcccagcaacaccaaggtcgacaagaaggtggagcccaagagctgcgacaagacccacaccgaggcccacaagagcgagatcgcccaccggtacaacgacctgggagagcagcatttcaagggactggtgctgatcgccttcagccagtacctgcagaagtgcagctacgacgagcacgccaagctggtgcaggaagtgaccgacttcgccaagacctgcgtggccgacgagagcgccgccaactgcgacaagagcctgcacaccctgttcggcgacaagctgtgcgccatccccaacctgcgggagaactacggcgagctggccgactgctgcaccaagcaggaacccgagcggaacgagtgcttcctgcagcacaaggacgacaaccccagcctgccccccttcgagaggcctgaggccgaggccatgtgcaccagcttcaaagagaaccccaccaccttcatgggccactacctgcacgaggtggccaggcggcacccctacttctacgcccccgagctgctgtactacgccgagcagtacaacgagatcctgacccagtgctgcgccgaggccgacaaagagagctgcctgacccccaagctggacggcgtgaaagaaaaggccctggtgtccagcgtgcggcagcggatgaagtgcagcagcatgcagaagttcggcgagcgggccttcaaggcctgggccgtggcccggctgtcccagaccttccccaacgccgatttcgccgagatcaccaagctggccaccgacctgaccaaggtgaacaaagagtgctgtcacggcgacctgctggaatgcgccgacgaccgggccgagctggccaagtacatgtgcgagaaccaggccaccatcagctccaaactgcagacctgctgtgataagcccctgctgaagaaggcccactgcctgagcgaggtggagcacgacaccatgcccgccgacctgcccgccattgccgccgacttcgtggaggaccaggaagtgtgcaagaattacgccgaggccaaggacgtgttcctgggcaccttcctgtacgagtacagcagacggcaccccgactacagcgtgagcctgctgctgaggctggccaagaagtacgaggccaccctggaaaagtgttgcgccgaagccaacccccctgcctgctacggcaccgtgctggccgagttccagcccctggtggaggaacccaagaacctggtgaaaaccaactgcgatctgtacgagaagctgggcgagtacggcttccagaacgccatcctggtccggtacacccagaaagccccccaggtgtccacccccacactggtggaggccgccaggaacctgggcagagtcggcaccaagtgctgcaccctgcccgaggatcagaggctgccctgtgtcgaggactacctgagcgccatcctgaacagagtgtgcctgctgcacgagaaaacccccgtgagcgagcacgtgaccaagtgttgcagcggcagcctggtggagcggaggccctgcttcagcgccctgaccgtggacgagacatacgtgcccaaagagttcaaggccgagacattcaccttccacagcgacatctgtaccctgcctgagaaagagaagcagatcaagaagcagaccgccctggccgaactggtgaagcacaagcccaaggccaccgccgagcagctgaaaaccgtgatggacgacttcgcccagttcctggacacctgctgcaaggccgccgacaaggacacctgtttcagcaccgagggccccaacctggtgacccggtgcaaggacgccctggcccaccatcatcaccatcac

SEQ ID NO: 235 - protein, 215 aa, Homo Sapien; identical to SEQ ID NO: 83

SEQ ID NO: 236 - DNA, 645 bp, Homo Sapien; identical to SEQ ID NO: 184

SEQ ID NO: 237 - protein, 817 aa, Homo Sapien
QVQLKESGPALVKPTQTLTLTCTFSGFSLSNRGGGVGWIRQPPGKALEWLAWIDWDDDKSYSTSLKTRLTISKDTSKNQVVLTMTNMDPVDTATYYCARMHLPLVFDSWGQGTLVTVSSASTKGPSVFPLAPSSKSTSGGTAALGCLVKDYFPEPVTVSWNSGALTSGVHTFPAVLQSSGLYSLSSVVTVPSSSLGTQTYICNVNHKPSNTKVDKRVEPKSCDKTHTEAHKSEIAHRYNDLGEQHFKGLVLIAFSQYLQKCSYDEHAKLVQEVTDFAKTCVADESAANCDKSLHTLFGDKLCAIPNLRENYGELADCCTKQEPERNECFLQHKDDNPSLPPFERPEAEAMCTSFKENPTTFMGHYLHEVARRHPYFYAPELLYYAEQYNEILTQCCAEADKESCLTPKLDGVKEKALVSSVRQRMKCSSMQKFGERAFKAWAVARLSQTFPNADFAEITKLATDLTKVNKECCHGDLLECADDRAELAKYMCENQATISSKLQTCCDKPLLKKAHCLSEVEHDTMPADLPAIAADFVEDQEVCKNYAEAKDVFLGTFLYEYSRRHPDYSVSLLLRLAKKYEATLEKCCAEANPPACYGTVLAEFQPLVEEPKNLVKTNCDLYEKLGEYGFQNAILVRYTQKAPQVSTPTLVEAARNLGRVGTKCCTLPEDQRLPCVEDYLSAILNRVCLLHEKTPVSEHVTKCCSGSLVERRPCFSALTVDETYVPKEFKAETFTFHSDICTLPEKEKQIKKQTALAELVKHKPKATAEQLKTVMDDFAQFLDTCCKAADKDTCFSTEGPNLVTRCKDALAHHHHHH

SEQ ID NO: 238 - DNA, 2451 bp, Homo Sapien
caggtgcaattgaaagaaagcggcccggccctggtgaaaccgacccaaaccctgaccctgacctgtaccttttccggatttagcctgtctaatcgtggtggtggtgtgggttggattcgccagccgcctgggaaagccctcgagtggctggcttggatcgattgggatgatgataagtcttatagcaccagcctgaaaacgcgtctgaccattagcaaagatacttcgaaaaatcaggtggtgctgactatgaccaacatggacccggtggatacggccacctattattgcgcgcgtatgcatcttcctcttgtttttgattcttggggccaaggcaccctggtgacggttagctcagctagcaccaagggccccagcgtgttccccctggcccccagcagcaagagcaccagcggcggcacagccgccctgggctgcctggtgaaggactacttccccgagcccgtgaccgtgtcctggaacagcggagccctgacctccggcgtgcacaccttccccgccgtgctgcagagcagcggcctgtacagcctgtccagcgtggtgacagtgcccagcagcagcctgggcacccagacctacatctgcaacgtgaaccacaagcccagcaacaccaaggtggacaagagagtggagcccaagagctgcgacaagacccacaccgaggcccacaagagcgagatcgcccaccggtacaacgacctgggagagcagcatttcaagggactggtgctgatcgccttcagccagtacctgcagaagtgcagctacgacgagcacgccaagctggtgcaggaagtgaccgacttcgccaagacctgcgtggccgacgagagcgccgccaactgcgacaagagcctgcacaccctgttcggcgacaagctgtgcgccatccccaacctgcgggagaactacggcgagctggccgactgctgcaccaagcaggaacccgagcggaacgagtgcttcctgcagcacaaggacgacaaccccagcctgccccccttcgagaggcctgaggccgaggccatgtgcaccagcttcaaagagaaccccaccaccttcatgggccactacctgcacgaggtggccaggcggcacccctacttctacgcccccgagctgctgtactacgccgagcagtacaacgagatcctgacccagtgctgcgccgaggccgacaaagagagctgcctgacccccaagctggacggcgtgaaagaaaaggccctggtgtccagcgtgcggcagcggatgaagtgcagcagcatgcagaagttcggcgagcgggccttcaaggcctgggccgtggcccggctgtcccagaccttccccaacgccgatttcgccgagatcaccaagctggccaccgacctgaccaaggtgaacaaagagtgctgtcacggcgacctgctggaatgcgccgacgaccgggccgagctggccaagtacatgtgcgagaaccaggccaccatcagctccaaactgcagacctgctgtgataagcccctgctgaagaaggcccactgcctgagcgaggtggagcacgacaccatgcccgccgacctgcccgccattgccgccgacttcgtggaggaccaggaagtgtgcaagaattacgccgaggccaaggacgtgttcctgggcaccttcctgtacgagtacagcagacggcaccccgactacagcgtgagcctgctgctgaggctggccaagaagtacgaggccaccctggaaaagtgttgcgccgaagccaacccccctgcctgctacggcaccgtgctggccgagttccagcccctggtggaggaacccaagaacctggtgaaaaccaactgcgatctgtacgagaagctgggcgagtacggcttccagaacgccatcctggtccggtacacccagaaagccccccaggtgtccacccccacactggtggaggccgccaggaacctgggcagagtcggcaccaagtgctgcaccctgcccgaggatcagaggctgccctgtgtcgaggactacctgagcgccatcctgaacagagtgtgcctgctgcacgagaaaacccccgtgagcgagcacgtgaccaagtgttgcagcggcagcctggtggagcggaggccctgcttcagcgccctgaccgtggacgagacatacgtgcccaaagagttcaaggccgagacattcaccttccacagcgacatctgtaccctgcctgagaaagagaagcagatcaagaagcagaccgccctggccgaactggtgaagcacaagcccaaggccaccgccgagcagctgaaaaccgtgatggacgacttcgcccagttcctggacacctgctgcaaggccgccgacaaggacacctgtttcagcaccgagggccccaacctggtgacccggtgcaaggacgccctggcccaccatcatcaccatcac

SEQ ID NO: 239 - protein, 847 aa, Homo Sapien
DIVLTQSPATLSLSPGERATLSCRASQFIGSRYLAWYQQKPGQAPRLLIYGASNRATGVPARFSGSGSGTDFTLTISSLEPEDFATYYCQQYYDYPQTFGQGTKVEIKGGGGSGGGGSGGGGSGGGGSQVQLKESGPALVKPTQTLTLTCTFSGFSLSNRGGGVGWIRQPPGKALEWLAWIDWDDDKSYSTSLKTRLTISKDTSKNQVVLTMTNMDPVDTATYYCARMHLPLVFDSWGQGTLVTVSSGGGGSGGGGSEAHKSEIAHRYNDLGEQHFKGLVLIAFSQYLQKCSYDEHAKLVQEVTDFAKTCVADESAANCDKSLHTLFGDKLCAIPNLRENYGELADCCTKQEPERNECFLQHKDDNPSLPPFERPEAEAMCTSFKENPTTFMGHYLHEVARRHPYFYAPELLYYAEQYNEILTQCCAEADKESCLTPKLDGVKEKALVSSVRQRMKCSSMQKFGERAFKAWAVARLSQTFPNADFAEITKLATDLTKVNKECCHGDLLECADDRAELAKYMCENQATISSKLQTCCDKPLLKKAHCLSEVEHDTMPADLPAIAADFVEDQEVCKNYAEAKDVFLGTFLYEYSRRHPDYSVSLLLRLAKKYEATLEKCCAEANPPACYGTVLAEFQPLVEEPKNLVKTNCDLYEKLGEYGFQNAILVRYTQKAPQVSTPTLVEAARNLGRVGTKCCTLPEDQRLPCVEDYLSAILNRVCLLHEKTPVSEHVTKCCSGSLVERRPCFSALTVDETYVPKEFKAETFTFHSDICTLPEKEKQIKKQTALAELVKHKPKATAEQLKTVMDDFAQFLDTCCKAADKDTCFSTEGPNLVTRCKDALAHHHHHH

SEQ ID NO: 240 - DNA, 2541 bp, Homo Sapien
gatatcgtgctgacacagagccctgccaccctgtctctgagccctggcgagagagccaccctgagctgccgggccagccagttcatcggctcccgctacctggcctggtatcagcagaagcccggacaggctcccagactgctgatctacggcgccagcaacagagctaccggcgtgcccgccagattttctggcagcggcagcggcaccgacttcaccctgaccatcagcagcctggaacccgaggacttcgccacctactactgccagcagtactacgactacccccagaccttcggccagggcaccaaggtggagatcaagggcggaggcggaagcgggggtggcggaagtggaggcggaggaagcggagggggcggaagccaggtgcaattgaaagagtccggccctgccctggtgaagcctacccagaccctgaccctgacatgcaccttcagcggcttcagcctgagcaacagaggcggcggagtgggctggatcagacagcctcccggcaaggccctggaatggctggcctggatcgactgggacgacgacaagagctacagcaccagcctgaaaacccggctgaccatctccaaggacaccagcaagaaccaggtggtgctcaccatgaccaacatggaccccgtggacaccgccacctattattgcgcccggatgcatctgcccctggtgttcgatagctggggccagggaaccctggtgacagtgtccagcggcggaggcggatccgggggtggcggaagtgaggcccacaagagcgagatcgcccaccggtacaacgacctgggagagcagcatttcaagggactggtgctgatcgccttcagccagtacctgcagaagtgcagctacgacgagcacgccaagctggtgcaggaagtgaccgacttcgccaagacctgcgtggccgacgagagcgccgccaactgcgacaagagcctgcacaccctgttcggcgacaagctgtgcgccatccccaacctgcgggagaactacggcgagctggccgactgctgcaccaagcaggaacccgagcggaacgagtgcttcctgcagcacaaggacgacaaccccagcctgccccccttcgagaggcctgaggccgaggccatgtgcaccagcttcaaagagaaccccaccaccttcatgggccactacctgcacgaggtggccaggcggcacccctacttctacgcccccgagctgctgtactacgccgagcagtacaacgagatcctgacccagtgctgcgccgaggccgacaaagagagctgcctgacccccaagctggacggcgtgaaagaaaaggccctggtgtccagcgtgcggcagcggatgaagtgcagcagcatgcagaagttcggcgagcgggccttcaaggcctgggccgtggcccggctgtcccagaccttccccaacgccgatttcgccgagatcaccaagctggccaccgacctgaccaaggtgaacaaagagtgctgtcacggcgacctgctggaatgcgccgacgaccgggccgagctggccaagtacatgtgcgagaaccaggccaccatcagctccaaactgcagacctgctgtgataagcccctgctgaagaaggcccactgcctgagcgaggtggagcacgacaccatgcccgccgacctgcccgccattgccgccgacttcgtggaggaccaggaagtgtgcaagaattacgccgaggccaaggacgtgttcctgggcaccttcctgtacgagtacagcagacggcaccccgactacagcgtgagcctgctgctgaggctggccaagaagtacgaggccaccctggaaaagtgttgcgccgaagccaacccccctgcctgctacggcaccgtgctggccgagttccagcccctggtggaggaacccaagaacctggtgaaaaccaactgcgatctgtacgagaagctgggcgagtacggcttccagaacgccatcctggtccggtacacccagaaagccccccaggtgtccacccccacactggtggaggccgccaggaacctgggcagagtcggcaccaagtgctgcaccctgcccgaggatcagaggctgccctgtgtcgaggactacctgagcgccatcctgaacagagtgtgcctgctgcacgagaaaacccccgtgagcgagcacgtgaccaagtgttgcagcggcagcctggtggagcggaggccctgcttcagcgccctgaccgtggacgagacatacgtgcccaaagagttcaaggccgagacattcaccttccacagcgacatctgtaccctgcctgagaaagagaagcagatcaagaagcagaccgccctggccgaactggtgaagcacaagcccaaggccaccgccgagcagctgaaaaccgtgatggacgacttcgcccagttcctggacacctgctgcaaggccgccgacaaggacacctgtttcagcaccgagggccccaacctggtgacccggtgcaaggacgccctggcccaccatcatcaccatcac

SEQ ID NO: 241 - protein, 211 aa, Homo Sapien; identical to SEQ ID NO: 16

SEQ ID NO: 242 - DNA, 633 bp, Homo Sapien; identical to SEQ ID NO: 167

SEQ ID NO: 243 - protein, 1069 aa, Homo Sapien
QVQLVESGGGLVQPGGSLRLSCAASGFTFSDYVINWVRQAPGKGLEWVSGISWSGVNTHYADSVKGRFTISRDNSKNTLYLQMNSLRAEDTAVYYCARLGATANNIRYKFMDVWGQGTLVTVSSASTKGPSVFPLAPSSKSTSGGTAALGCLVKDYFPEPVTVSWNSGALTSGVHTFPAVLQSSGLYSLSSVVTVPSSSLGTQTYICNVNHKPSNTKVDKKVEPKSCDKTHTEAHKSEIAHRYNDLGEQHFKGLVLIAFSQYLQKSSYDEHAKLVQEVTDFAKTCVADESAANCDKSLHTLFGDKLCAIPNLRENYGELADCCTKQEPERNECFLQHKDDNPSLPPFERPEAEAMCTSFKENPTTFMGHYLHEVARRHPYFYAPELLYYAEQYNEILTQCCAEADKESCLTPKLDGVKEKALVSSVRQRMKCSSMQKFGERAFKAWAVARLSQTFPNADFAEITKLATDLTKVNKECCHGDLLECADDRAELAKYMCENQATISSKLQTCCDKPLLKKAHCLSEVEHDTMPADLPAIAADFVEDQEVCKNYAEAKDVFLGTFLYEYSRRHPDYSVSLLLRLAKKYEATLEKCCAEANPPACYGTVLAEFQPLVEEPKNLVKTNCDLYEKLGEYGFQNAILVRYTQKAPQVSTPTLVEAARNLGRVGTKCCTLPEDQRLPCVEDYLSAILNRVCLLHEKTPVSEHVTKCCSGSLVERRPCFSALTVDETYVPKEFKAETFTFHSDICTLPEKEKQIKKQTALAELVKHKPKATAEQLKTVMDDFAQFLDTCCKAADKDTCFSTEGPNLVTRSKDALAGGSGGSDIVLTQSPATLSLSPGERATLSCRASQFIGSRYLAWYQQKPGQAPRLLIYGASNRATGVPARFSGSGSGTDFTLTISSLEPEDFATYYCQQYYDYPQTFGQGTKVEIKGGGGSGGGGSGGGGSGGGGSQVQLKESGPALVKPTQTLTLTCTFSGFSLSNRGGGVGWIRQPPGKALEWLAWIDWDDDKSYSTSLKTRLTISKDTSKNQVVLTMTNMDPVDTATYYCARMHLPLVFDSWGQGTLVTVSS

SEQ ID NO: 244 - DNA, 3207 bp, Homo Sapien
caggtgcaattggtcgagtctggcggaggactggtgcagcctggtggcagcctgagactgagctgcgccgccagcggcttcaccttcagcgactacgtgatcaactgggtgcgacaggcccctggaaagggcctggaatgggtgtccggcatctcttggtctggcgtgaacacccactacgccgacagcgtgaagggccggttcaccatcagccgggacaacagcaagaacaccctgtacctgcagatgaacagcctgagagccgaggacaccgccgtgtactactgtgccagactgggcgccaccgccaacaacatccggtacaagttcatggacgtgtggggccagggcacacttgtgaccgtcagctcagctagcaccaagggccccagcgtgttccccctggcccccagcagcaagagcacctctggcggcactgctgccctgggctgcctggtcaaggactacttccccgagcccgtgacagtgtcctggaacagcggagccctgacctccggcgtgcacaccttccccgccgtgctgcagagcagcggcctgtacagcctgagcagcgtggtcacagtgcccagcagcagcctgggcacccagacctacatctgcaacgtgaaccacaagcccagcaacaccaaggtcgacaagaaggtggagcccaagagctgcgacaagacccacaccgaggcccacaagagcgagatcgcccaccggtacaacgacctgggagagcagcatttcaagggactggtgctgatcgccttcagccagtacctgcagaagtccagctacgacgagcacgccaagctggtgcaggaagtgaccgacttcgccaagacctgcgtggccgacgagagcgccgccaactgcgacaagagcctgcacaccctgttcggcgacaagctgtgcgccatccccaacctgcgggagaactacggcgagctggccgactgctgcaccaagcaggaacccgagcggaacgagtgcttcctgcagcacaaggacgacaaccccagcctgccccccttcgagaggcctgaggccgaggccatgtgcaccagcttcaaagagaaccccaccaccttcatgggccactacctgcacgaggtggccaggcggcacccctacttctacgcccccgagctgctgtactacgccgagcagtacaacgagatcctgacccagtgctgcgccgaggccgacaaagagagctgcctgacccccaagctggacggcgtgaaagaaaaggccctggtgtccagcgtgcggcagcggatgaagtgcagcagcatgcagaagttcggcgagcgggccttcaaggcctgggccgtggcccggctgtcccagaccttccccaacgccgatttcgccgagatcaccaagctggccaccgacctgaccaaggtgaacaaagagtgctgtcacggcgacctgctggaatgcgccgacgaccgggccgagctggccaagtacatgtgcgagaaccaggccaccatcagctccaaactgcagacctgctgtgataagcccctgctgaagaaggcccactgcctgagcgaggtggagcacgacaccatgcccgccgacctgcccgccattgccgccgacttcgtggaggaccaggaagtgtgcaagaattacgccgaggccaaggacgtgttcctgggcaccttcctgtacgagtacagcagacggcaccccgactacagcgtgagcctgctgctgaggctggccaagaagtacgaggccaccctggaaaagtgttgcgccgaagccaacccccctgcctgctacggcaccgtgctggccgagttccagcccctggtggaggaacccaagaacctggtgaaaaccaactgcgatctgtacgagaagctgggcgagtacggcttccagaacgccatcctggtccggtacacccagaaagccccccaggtgtccacccccacactggtggaggccgccaggaacctgggcagagtcggcaccaagtgctgcaccctgcccgaggatcagaggctgccctgtgtcgaggactacctgagcgccatcctgaacagagtgtgcctgctgcacgagaaaacccccgtgagcgagcacgtgaccaagtgttgcagcggcagcctggtggagcggaggccctgcttcagcgccctgaccgtggacgagacatacgtgcccaaagagttcaaggccgagacattcaccttccacagcgacatctgtaccctgcctgagaaagagaagcagatcaagaagcagaccgccctggccgaactggtgaagcacaagcccaaggccaccgccgagcagctgaaaaccgtgatggacgacttcgcccagttcctggacacctgctgcaaggccgccgacaaggacacctgtttcagcaccgagggccccaacctggtgacccggtccaaggacgccctggccggcggctccggcggaagcgatatcgtgctgacacagagccctgccaccctgtctctgagccctggcgagagagccaccctgagctgccgggccagccagttcatcggctcccgctacctggcctggtatcagcagaagcccggacaggctcccagactgctgatctacggcgccagcaacagagctaccggcgtgcccgccagattttctggcagcggcagcggcaccgacttcaccctgaccatcagcagcctggaacccgaggacttcgccacctactactgccagcagtactacgactacccccagaccttcggccagggcaccaaggtggagatcaagggcggaggcggatccgggggtggcggaagtggaggcggaggaagcggagggggcggaagccaggtgcaattgaaagagtccggccctgccctggtgaagcctacccagaccctgaccctgacatgcaccttcagcggcttcagcctgagcaacagaggcggcggagtgggctggatcagacagcctcccggcaaggccctggaatggctggcctggatcgactgggacgacgacaagagctacagcaccagcctgaaaacccggctgaccatctccaaggacaccagcaagaaccaggtggtgctcaccatgaccaacatggaccccgtggacaccgccacctattattgcgcccggatgcatctgcccctggtgttcgatagctggggccagggaaccctggtgacagtgtccagc

SEQ ID NO: 245 - protein, 211 aa, Homo Sapien; identical to SEQ ID NO: 16

SEQ ID NO: 246 - DNA, 633 bp, Homo Sapien; identical to SEQ ID NO: 167

SEQ ID NO: 247 - protein, 1070 aa, Homo Sapien
QVQLVESGGGLVQPGGSLRLSCAASGFTFSDYVINWVRQAPGKGLEWVSGISWSGVNTHYADSVKGRFTISRDNSKNTLYLQMNSLRAEDTAVYYCARLGATANNIRYKFMDVWGQGTLVTVSSASTKGPSVFPLAPSSKSTSGGTAALGCLVKDYFPEPVTVSWNSGALTSGVHTFPAVLQSSGLYSLSSVVTVPSSSLGTQTYICNVNHKPSNTKVDKKVEPKSCDKTHTDAHKSEVAHRFKDLGEENFKALVLIAFAQYLQQSPFEDHVKLVNEVTEFAKTCVADESAENCDKSLHTLFGDKLCTVATLRETYGEMADCCAKQEPERNECFLQHKDDNPNLPRLVRPEVDVMCTAFHDNEETFLKKYLYEIARRHPYFYAPELLFFAKRYKAAFTECCQAADKAACLLPKLDELRDEGKASSAKQRLKCASLQKFGERAFKAWAVARLSQRFPKAEFAEVSKLVTDLTKVHTECCHGDLLECADDRADLAKYICENQDSISSKLKECCEKPLLEKSHCIAEVENDEMPADLPSLAADFVESKDVCKNYAEAKDVFLGMFLYEYARRHPDYSVVLLLRLAKTYETTLEKCCAAADPHECYAKVFDEFKPLVEEPQNLIKQNCELFEQLGEYKFQNALLVRYTKKVPQVSTPTLVEVSRNLGKVGSKCCKHPEAKRMPCAEDYLSVVLNQLCVLHEKTPVSDRVTKCCTESLVNRRPCFSALEVDETYVPKEFNAETFTFHADICTLSEKERQIKKQTALVELVKHKPKATKEQLKAVMDDFAAFVEKCCKADDKETCFAEEGKKLVAASQAALGLGGSGGSDIVLTQSPATLSLSPGERATLSCRASQFIGSRYLAWYQQKPGQAPRLLIYGASNRATGVPARFSGSGSGTDFTLTISSLEPEDFATYYCQQYYDYPQTFGQGTKVEIKGGGGSGGGGSGGGGSGGGGSQVQLKESGPALVKPTQTLTLTCTFSGFSLSNRGGGVGWIRQPPGKALEWLAWIDWDDDKSYSTSLKTRLTISKDTSKNQVVLTMTNMDPVDTATYYCARMHLPLVFDSWGQGTLVTVSS

SEQ ID NO: 248 - DNA, 3210 bp, Homo Sapien
caggtgcaattggtcgagtctggcggaggactggtgcagcctggtggcagcctgagactgagctgcgccgccagcggcttcaccttcagcgactacgtgatcaactgggtgcgacaggcccctggaaagggcctggaatgggtgtccggcatctcttggtctggcgtgaacacccactacgccgacagcgtgaagggccggttcaccatcagccgggacaacagcaagaacaccctgtacctgcagatgaacagcctgagagccgaggacaccgccgtgtactactgtgccagactgggcgccaccgccaacaacatccggtacaagttcatggacgtgtggggccagggcacactggtgaccgtcagctcagctagcaccaagggccccagcgtgttccccctggccccctccagcaagtccacaagcggtggcacagcagctctgggttgcctggtgaaggactacttccccgagcccgtgacagtgtcctggaactctggcgccctgacctccggcgtgcacaccttccccgccgtgctgcagagcagcggcctgtacagcctgagcagcgtggtgacagtccccagcagcagcttgggcacccagacctacatctgcaacgtgaaccacaagcccagcaacaccaaggtggacaagaaggtggagcccaagagctgcgacaagacccacaccgacgcccacaagagcgaggtggcccaccggttcaaggacctgggcgaggaaaacttcaaggccctggtgctgatcgccttcgcccagtacctgcagcagagccccttcgaagatcacgtaaagttagtcaacgaggttacggaattcgcaaagacatgcgttgctgacgaatccgctgagaattgtgacaagagtttgcacactttattcggagataagttgtgtactgtagctactttgagagagacttacggtgaaatggctgactgctgtgcaaaacaggaaccagaacgtaacgaatgtttccttcagcataaggatgataaccctaaccttccaaggcttgttaggccagaagtcgacgtgatgtgcaccgccttccatgataatgaagagacttttcttaaaaagtacctatacgagattgcaaggcgtcatccatatttttacgccccagagctgttgtttttcgcaaagagatacaaagctgcatttactgagtgttgccaagctgccgacaaggccgcttgtttgctaccaaagttggacgaattgagagacgagggtaaggcatcatctgccaagcagagattaaaatgtgcatctttgcaaaaatttggagagagagcttttaaggcatgggctgttgcccgactaagccaaagattcccaaaagccgaatttgctgaagtatccaagctggtgactgatttgactaaagtacatacagaatgttgccatggcgaccttttagaatgtgctgatgacagagcagatttggctaagtatatctgcgaaaatcaagattcaatcagctctaagctgaaggaatgttgcgagaaaccactgttagaaaaatcgcattgtattgctgaagttgaaaatgatgagatgcctgctgacttgccttctcttgccgctgattttgttgagtcgaaggatgtctgtaagaattatgctgaagctaaagacgttttcctgggtatgttcttatatgagtacgcaagacgtcacccagattactctgtggttctgctactgagattggctaaaacatacgagacaacgctggagaagtgctgtgctgccgctgaccctcatgagtgctatgcaaaggtttttgatgaattcaaaccattggttgaagagcctcaaaacttgataaagcagaactgtgagctgtttgagcaattgggtgagtataagttccaaaatgccctgttggtgagatatacaaaaaaggtaccccaagtttcaacgcccactttagttgaagtgtccagaaatcttggtaaagtgggtagcaaatgttgcaagcatccagaagccaagcgaatgccctgtgctgaggattatctgtccgtcgtgttgaaccaattgtgcgtattacacgaaaaaaccccagtctctgatagagtcaccaaatgttgcactgagtcactagttaatagaaggccttgtttttccgctttggaagttgatgaaacctacgtgcctaaggaatttaacgctgagacctttacctttcacgctgacatttgtactttgagtgaaaaagagcgtcaaatcaaaaagcaaaccgctcttgttgaattggtgaaacacaagcctaaggctacgaaggagcagcttaaagccgtcatggacgatttcgccgcatttgttgaaaaatgctgtaaagctgatgacaaggaaacatgtttcgctgaagagggaaagaaattggttgcggccagtcaggcagcgcttggtttgggcggctccggcggaagcgatatcgtgctgacacagagccctgccaccctgtctctgagccctggcgagagagccaccctgagctgccgggccagccagttcatcggctcccgctacctggcctggtatcagcagaagcccggacaggctcccagactgctgatctacggcgccagcaacagagctaccggcgtgcccgccagattttctggcagcggcagcggcaccgacttcaccctgaccatcagcagcctggaacccgaggacttcgccacctactactgccagcagtactacgactacccccagaccttcggccagggcaccaaggtggagatcaagggcggaggcggatccgggggtggcggaagtggaggcggaggaagcggagggggcggaagccaggtgcaattgaaagagtccggccctgccctggtgaagcctacccagaccctgaccctgacatgcaccttcagcggcttcagcctgagcaacagaggcggcggagtgggctggatcagacagcctcccggcaaggccctggaatggctggcctggatcgactgggacgacgacaagagctacagcaccagcctgaaaacccggctgaccatctccaaggacaccagcaagaaccaggtggtgctcaccatgaccaacatggaccccgtggacaccgccacctattattgcgcccggatgcatctgcccctggtgttcgatagctggggccagggaaccctggtgacagtgtccagc

SEQ ID NO: 249 - protein, 211 aa, Homo Sapien; identical to SEQ ID NO: 16

SEQ ID NO: 250 - DNA, 633 bp, Homo Sapien; identical to SEQ ID NO: 167

SEQ ID NO: 251 - protein, 1290 aa, Homo Sapien [sequence omitted]

SEQ ID NO: 252 - DNA, 3870 bp, Homo Sapien
caggtgcaattggtcgagtctggcggaggactggtgcagcctggtggcagcctgagactgagctgcgccgccagcggcttcaccttcagcgactacgtgatcaactgggtgcgacaggcccctggaaagggcctggaatgggtgtccggcatctcttggtctggcgtgaacacccactacgccgacagcgtgaagggccggttcaccatcagccgggacaacagcaagaacaccctgtacctgcagatgaacagcctgagagccgaggacaccgccgtgtactactgtgccagactgggcgccaccgccaacaacatccggtacaagttcatggacgtgtggggccagggcacactggtgaccgtcagctcagctagcaccaagggccccagcgtgttccccctggccccctccagcaagtccacaagcggtggcacagcagctctgggttgcctggtgaaggactacttccccgagcccgtgacagtgtcctggaactctggcgccctgacctccggcgtgcacaccttccccgccgtgctgcagagcagcggcctgtacagcctgagcagcgtggtgacagtccccagcagcagcttgggcacccagacctacatctgcaacgtgaaccacaagcccagcaacaccaaggtggacaagaaggtggagcccaagagctgcgacaagacccacaccgacgcccacaagagcgaggtggcccaccggttcaaggacctgggcgaggaaaacttcaaggccctggtgctgatcgccttcgcccagtacctgcagcagagccccttcgaagatcacgtaaagttagtcaacgaggttacggaattcgcaaagacatgcgttgctgacgaatccgctgagaattgtgacaagagtttgcacactttattcggagataagttgtgtactgtagctactttgagagagacttacggtgaaatggctgactgctgtgcaaaacaggaaccagaacgtaacgaatgtttccttcagcataaggatgataaccctaaccttccaaggcttgttaggccagaagtcgacgtgatgtgcaccgccttccatgataatgaagagacttttcttaaaaagtacctatacgagattgcaaggcgtcatccatatttttacgccccagagctgttgtttttcgcaaagagatacaaagctgcatttactgagtgttgccaagctgccgacaaggccgcttgtttgctaccaaagttggacgaattgagagacgagggtaaggcatcatctgccaagcagagattaaaatgtgcatctttgcaaaaatttggagagagagcttttaaggcatgggctgttgcccgactaagccaaagattcccaaaagccgaatttgctgaagtatccaagctggtgactgatttgactaaagtacatacagaatgttgccatggcgaccttttagaatgtgctgatgacagagcagatttggctaagtatatctgcgaaaatcaagattcaatcagctctaagctgaaggaatgttgcgagaaaccactgttagaaaaatcgcattgtattgctgaagttgaaaatgatgagatgcctgctgacttgccttctcttgccgctgattttgttgagtcgaaggatgtctgtaagaattatgctgaagctaaagacgttttcctgggtatgttcttatatgagtacgcaagacgtcacccagattactctgtggttctgctactgagattggctaaaacatacgagacaacgctggagaagtgctgtgctgccgctgaccctcatgagtgctatgcaaaggtttttgatgaattcaaaccattggttgaagagcctcaaaacttgataaagcagaactgtgagctgtttgagcaattgggtgagtataagttccaaaatgccctgttggtgagatatacaaaaaaggtaccccaagtttcaacgcccactttagttgaagtgtccagaaatcttggtaaagtgggtagcaaatgttgcaagcatccagaagccaagcgaatgccctgtgctgaggattatctgtccgtcgtgttgaaccaattgtgcgtattacacgaaaaaaccccagtctctgatagagtcaccaaatgttgcactgagtcactagttaatagaaggccttgtttttccgctttggaagttgatgaaacctacgtgcctaaggaatttaacgctgagacctttacctttcacgctgacatttgtactttgagtgaaaaagagcgtcaaatcaaaaagcaaaccgctcttgttgaattggtgaaacacaagcctaaggctacgaaggagcagcttaaagccgtcatggacgatttcgccgcatttgttgaaaaatgctgtaaagctgatgacaaggaaacatgtttcgctgaagagggaaagaaattggttgcggccagtcaggcagcgcttggtttgggcggctccggcggaagcgatatcgtgctgacccagagcccggcgaccctgagcctgtctccgggcgaacgtgcgaccctgagctgcagagcgagccagtttattggttctcgttatctggcttggtaccagcagaaaccaggtcaagcaccgcgtctattaatttatggtgcttctaatcgtgcaactggggtcccggcgcgttttagcggctctggatccggcacggattttaccctgaccattagcagcctggaacctgaagactttgcgacttattattgccagcagtattatgattatcctcagacctttggccagggtacgaaagttgaaattaaacgtacggtggccgctcccagcgtgttcatcttcccccccagcgacgagcagctgaagagcggcaccgccagcgtggtgtgcctgctgaacaacttctacccccgggaggccaaggtgcagtggaaggtggacaacgccctgcagagcggcaacagccaggagagcgtcaccgagcaggacagcaaggactccacctacagcctgagcagcaccctgaccctgagcaaggccgactacgagaagcataaggtgtacgcctgcgaggtgacgcaccagggcctgtccagccccgtgaccaagagcttcaacaggggcgagtgcggaggtgggggatcgggaggaggtgggtcaggtggaggagggtcagggggagggggctcgggaggcggtggctccggagggggtgggagccaagtgcaattgaaagaaagcggcccggccctggtgaaaccgacccaaaccctgaccctgacctgtaccttttccggatttagcctgtctaatcgtggtggtggtgtgggttggattcgccagccgcctgggaaagccctcgagtggctggcttggatcgattgggatgatgataagtcttatagcaccagcctgaaaacgcgtctgaccattagcaaagatacttcgaaaaatcaggtggtgctgactatgaccaacatggacccggtggatacggccacctattattgcgcgcgtatgcatcttcctcttgtttttgattcttggggccaaggcaccctggtgacggttagctcagctagcaccaagggccccagcgtgttccccctggcccccagcagcaagagcaccagcggcggcacagccgccctgggctgcctggtgaaggactacttccccgagcccgtgaccgtgtcctggaacagcggagccctgacctccggcgtgcacaccttccccgccgtgctgcagagcagcggcctgtacagcctgtccagcgtggtgacagtgcccagcagcagcctgggcacccagacctacatctgcaacgtgaaccacaagcccagcaacaccaaggtggacaagagagtggagcccaagagctgc

SEQ ID NO: 253 - protein, 211 aa, Homo Sapien; identical to SEQ ID NO: 16

SEQ ID NO: 254 - DNA, 633 bp, Homo Sapien; identical to SEQ ID NO: 167

SEQ ID NO: 255 - protein, 707 aa, Homo Sapien [sequence omitted]

SEQ ID NO: 256 - DNA, 2121 bp, Homo Sapien
caggtgcaattggtcgagtctggcggaggactggtgcagcctggtggcagcctgagactgagctgcgccgccagcggcttcaccttcagcgactacgtgatcaactgggtgcgacaggcccctggaaagggcctggaatgggtgtccggcatctcttggtctggcgtgaacacccactacgccgacagcgtgaagggccggttcaccatcagccgggacaacagcaagaacaccctgtacctgcagatgaacagcctgagagccgaggacaccgccgtgtactactgtgccagactgggcgccaccgccaacaacatccggtacaagttcatggacgtgtggggccagggcacactggtgaccgtcagctcagctagcaccaagggccccagcgtgttccccctggcccccagcagcaagagcaccagcggcggcacagccgccctgggctgcctggtgaaggactacttccccgagcccgtgaccgtgtcctggaacagcggagccctgacctccggcgtgcacaccttccccgccgtgctgcagagcagcggcctgtacagcctgtccagcgtggtgacagtgcccagcagcagcctgggcacccagacctacatctgcaacgtgaaccacaagcccagcaacaccaaggtggacaagagagtggagcccaagagctgcgacaagacccacaccggcccccccggcccagccccagaggcagcgggcggaccctccgtgttcctgttcccccccaagcccaaggacaccctgatgatcagcaggacccccgaggtgacctgcgtggtggtggacgtgagccacgaggacccagaggtgaagttcaactggtacgtggacggcgtggaggtgcacaacgccaagaccaagcccagagaggagcagtacaacagcacctacagggtggtgtccgtgctgaccgtgctgcaccaggactggctgaacggcaaggaatacaagtgcaaggtctccaacaaggccctgccagcccccatcgaaaagaccatcagcaaggccaagggccagccacgggagccccaggtgtacaccctgcccccctcccgggaggagatgaccaagaaccaggtgtccctgacctgtctggtgaagggcttctaccccagcgacatcgccgtggagtgggagagcaacggccagcccgagaacaactacaagaccacccccccagtgctggacagcgacggcagcttcaccctggacagcaagctgaccgtggacaagtccaggtggcagcagggcaacgtgttcagctgcagcgtgatgcacgaagcgctgcacaaccactacacccagaagagcctgagcctgtcccccggcaagggcggctccggcggaagcgatatcgtgctgacacagagccctgccaccctgtctctgagccctggcgagagagccaccctgagctgccgggccagccagttcatcggctcccgctacctggcctggtatcagcagaagcccggacaggctcccagactgctgatctacggcgccagcaacagagctaccggcgtgcccgccagattttctggcagcggcagcggcaccgacttcaccctgaccatcagcagcctggaacccgaggacttcgccacctactactgccagcagtactacgactacccccagaccttcggccagggcaccaaggtggagatcaagggcggaggcggatccgggggtggcggaagtggaggcggaggaagcggagggggcggaagccaggtgcaattgaaagagtccggccctgccctggtgaagcctacccagaccctgaccctgacatgcaccttcagcggcttcagcctgagcaacagaggcggcggagtgggctggatcagacagcctcccggcaaggccctggaatggctggcctggatcgactgggacgacgacaagagctacagcaccagcctgaaaacccggctgaccatctccaaggacaccagcaagaaccaggtggtgctcaccatgaccaacatggaccccgtggacaccgccacctattattgcgcccggatgcatctgcccctggtgttcgatagctggggccagggaaccctggtgacagtgtccagc

SEQ ID NO: 257 - protein, 211 aa, Homo Sapien; identical to SEQ ID NO: 16

SEQ ID NO: 258 - DNA, 633 bp, Homo Sapien; identical to SEQ ID NO: 167

SEQ ID NO: 259 - protein, 929 aa, Homo Sapien [sequence omitted]

SEQ ID NO: 260 - DNA, 2787 bp, Homo Sapien
caggtgcaattggtcgagtctggcggaggactggtgcagcctggtggcagcctgagactgagctgcgccgccagcggcttcaccttcagcgactacgtgatcaactgggtgcgacaggcccctggaaagggcctggaatgggtgtccggcatctcttggtctggcgtgaacacccactacgccgacagcgtgaagggccggttcaccatcagccgggacaacagcaagaacaccctgtacctgcagatgaacagcctgagagccgaggacaccgccgtgtactactgtgccagactgggcgccaccgccaacaacatccggtacaagttcatggacgtgtggggccagggcacactggtgaccgtcagctcagctagcaccaagggccccagcgtgttccccctggcccccagcagcaagagcaccagcggcggcacagccgccctgggctgcctggtgaaggactacttccccgagcccgtgaccgtgtcctggaacagcggagccctgacctccggcgtgcacaccttccccgccgtgctgcagagcagcggcctgtacagcctgtccagcgtggtgacagtgcccagcagcagcctgggcacccagacctacatctgcaacgtgaaccacaagcccagcaacaccaaggtggacaagagagtggagcccaagagctgcgacaagacccacaccggcccccccggcccagccccagaggcagcgggcggaccctccgtgttcctgttcccccccaagcccaaggacaccctgatgatcagcaggacccccgaggtgacctgcgtggtggtggacgtgagccacgaggacccagaggtgaagttcaactggtacgtggacggcgtggaggtgcacaacgccaagaccaagcccagagaggagcagtacaacagcacctacagggtggtgtccgtgctgaccgtgctgcaccaggactggctgaacggcaaggaatacaagtgcaaggtctccaacaaggccctgccagcccccatcgaaaagaccatcagcaaggccaagggccagccacgggagccccaggtgtacaccctgcccccctcccgggaggagatgaccaagaaccaggtgtccctgacctgtctggtgaagggcttctaccccagcgacatcgccgtggagtgggagagcaacggccagcccgagaacaactacaagaccacccccccagtgctggacagcgacggcagcttcaccctggacagcaagctgaccgtggacaagtccaggtggcagcagggcaacgtgttcagctgcagcgtgatgcacgaagcgctgcacaaccactacacccagaagagcctgagcctgtcccccggcaagtcccccccctccccagccccagaggcagcgggcggaccctccgtgttcctgttcccccccaagcccaaggacaccctgatgatcagcaggacccccgaggtgacctgcgtggtggtggacgtgagccacgaggacccagaggtgaagttcaactggtacgtggacggcgtggaggtgcacaacgccaagaccaagcccagagaggagcagtacaacagcacctacagggtggtgtccgtgctgaccgtgctgcaccaggactggctgaacggcaaggaatacaagtgcaaggtctccaacaaggccctgccagcccccatcgaaaagaccatcagcaaggccaagggccagccacgggagccccaggtgtacaccctgcccccctcccgggaggagatgaccaagaaccaggtgtccctgacctgtctggtgaagggcttctaccccagcgacatcgccgtggagtgggagagcaacggccagcccgagaacaactacaagaccacccccccagtgctggacagcgacggcagcttcaccctggacagcaagctgaccgtggacaagtccaggtggcagcagggcaacgtgttcagctgcagcgtgatgcacgaagccctgcacaaccactacacccagaagagcctgagcctgtcccccggcaagggcggctccggcggaagcgatatcgtgctgacacagagccctgccaccctgtctctgagccctggcgagagagccaccctgagctgccgggccagccagttcatcggctcccgctacctggcctggtatcagcagaagcccggacaggctcccagactgctgatctacggcgccagcaacagagctaccggcgtgcccgccagattttctggcagcggcagcggcaccgacttcaccctgaccatcagcagcctggaacccgaggacttcgccacctactactgccagcagtactacgactacccccagaccttcggccagggcaccaaggtggagatcaagggcggaggcggatccgggggtggcggaagtggaggcggaggaagcggagggggcggaagccaggtgcaattgaaagagtccggccctgccctggtgaagcctacccagaccctgaccctgacatgcaccttcagcggcttcagcctgagcaacagaggcggcggagtgggctggatcagacagcctcccggcaaggccctggaatggctggcctggatcgactgggacgacgacaagagctacagcaccagcctgaaaacccggctgaccatctccaaggacaccagcaagaaccaggtggtgctcaccatgaccaacatggaccccgtggacaccgccacctattattgcgcccggatgcatctgcccctggtgttcgatagctggggccagggaaccctggtgacagtgtccagc

SEQ ID NO: 261 - protein, 213 aa, Homo Sapien
DIELTQPPSVSVAPGQTARISCSGDNIGSKYVHWYQQKPGQAPVLVIYGDSNRPSGIPERFSGSNSGNTATLTISGTQAEDEADYYCTRTSTPISGVFGGGTKLTVLGQPKAAPSVTLFPPSSEELQANKATLVCLISDFYPGAVTVAWKADSSPVKAGVETTTPSKQSNNKYAASSYLSLTPEQWKSHRSYSCQVTHEGSTVEKTVAPTEAC

SEQ ID NO: 262 - DNA, 639 bp, Homo Sapien
gatatcgaactgacccagccgccttcagtgagcgttgcaccaggtcagaccgcgcgtatctcgtgtagcggcgataatattggttctaagtatgttcattggtaccagcagaaacccgggcaggcgccagttcttgtgatttatggtgattctaatcgtccctcaggcatcccggaacgctttagcggatccaacagcggcaacaccgcgaccctgaccattagcggcactcaggcggaagacgaagcggattattattgcactcgtacttctactcctatttctggtgtgtttggcggcggcacgaagttaaccgttcttggccagccgaaagccgcaccgagtgtgacgctgtttccgccgagcagcgaagaattgcaggcgaacaaagcgaccctggtgtgcctgattagcgacttttatccgggagccgtgacagtggcctggaaggcagatagcagccccgtcaaggcgggagtggagaccaccacaccctccaaacaaagcaacaacaagtacgcggccagcagctatctgagcctgacgcctgagcagtggaagtcccacagaagctacagctgccaggtcacgcatgaggggagcaccgtggaaaaaaccgttgcgccgactgaggcctgc

SEQ ID NO: 263 - protein, 222 aa, Homo Sapien
QVQLVESGGGLVQPGGSLRLSCAASGFTFSVNGMHWVRQAPGKGLEWVSVIDGMGHTYYADSVKGRFTISRDNSKNTLYLQMNSLRAEDTAVYYCARYDYIKYGAFDPWGQGTLVTVSSASTKGPSVFPLAPSSKSTSGGTAALGCLVKDYFPEPVTVSWNSGALTSGVHTFPAVLQSSGLYSLSSVVTVPSSSLGTQTYICNVNHKPSNTKVDKKVEPKSC

SEQ ID NO: 264 - DNA, 666 bp, Homo Sapien
caggtgcaattggtggaaagcggcggcggcctggtgcaaccgggcggcagcctgcgtctgagctgcgcggcctccggatttaccttttctgttaatggtatgcattgggtgcgccaagcccctgggaagggtctcgagtgggtgagcgttattgatggtatgggtcatacttattatgctgattctgttaagggtcgttttaccatttcacgtgataattcgaaaaacaccctgtatctgcaaatgaacagcctgcgtgcggaagatacggccgtgtattattgcgcgcgttatgattatattaagtatggtgcttttgatccttggggccaaggcaccctggtgacggttagctcagcgtcgaccaaaggtccaagcgtgtttccgctggctccgagcagcaaaagcaccagcggcggcacggctgccctgggctgcctggttaaagattatttcccggaaccagtcaccgtgagctggaacagcggggcgctgaccagcggcgtgcatacctttccggcggtgctgcaaagcagcggcctgtatagcctgagcagcgttgtgaccgtgccgagcagcagcttaggcactcagacctatatttgcaacgtgaaccataaaccgagcaacaccaaagtggataaaaaagtggaaccgaaaagctgc

SEQ ID NO: 265 - protein, 1105 aa, Homo Sapien
QVQLVESGGGLVQPGGSLRLSCAASGFTFSDYVINWVRQAPGKGLEWVSGISWSGVNTHYADSVKGRFTISRDNSKNTLYLQMNSLRAEDTAVYYCARLGATANNIRYKFMDVWGQGTLVTVSSGGGGSGGGGSGGGGSGGGGSDIELTQPPSVSVAPGQTARISCSGDSLRNKVYWYQQKPGQAPVLVIYKNNRPSGIPERFSGSNSGNTATLTISGTQAEDEADYYCQSYDGQKSLVFGGGTKLTVLAASDAHKSEVAHRFKDLGEENFKALVLIAFAQYLQQSPFEDHVKLVNEVTEFAKTCVADESAENCDKSLHTLFGDKLCTVATLRETYGEMADCCAKQEPERNECFLQHKDDNPNLPRLVRPEVDVMCTAFHDNEETFLKKYLYEIARRHPYFYAPELLFFAKRYKAAFTECCQAADKAACLLPKLDELRDEGKASSAKQRLKCASLQKFGERAFKAWAVARLSQRFPKAEFAEVSKLVTDLTKVHTECCHGDLLECADDRADLAKYICENQDSISSKLKECCEKPLLEKSHCIAEVENDEMPADLPSLAADFVESKDVCKNYAEAKDVFLGMFLYEYARRHPDYSVVLLLRLAKTYETTLEKCCAAADPHECYAKVFDEFKPLVEEPQNLIKQNCELFEQLGEYKFQNALLVRYTKKVPQVSTPTLVEVSRNLGKVGSKCCKHPEAKRMPCAEDYLSVVLNQLCVLHEKTPVSDRVTKCCTESLVNRRPCFSALEVDETYVPKEFQAETFTFHADICTLSEKERQIKKQTALVELVKHKPKATKEQLKAVMDDFAAFVEKCCKADDKETCFAEEGKKLVAASQAALGLAAALDIVLTQSPATLSLSPGERATLSCRASQFIGSRYLAWYQQKPGQAPRLLIYGASNRATGVPARFSGSGSGTDFTLTISSLEPEDFATYYCQQYYDYPQTFGQGTKVEIKGGGGSGGGGSGGGGSGGGGSQVQLKESGPALVKPTQTLTLTCTFSGFSLSNRGGGVGWIRQPPGKALEWLAWIDWDDDKSYSTSLKTRLTISKDTSKNQVVLTMTNMDPVDTATYYCARMHLPLVFDSWGQGTLVTVSSAAAENLYFQGSHHHHHH

SEQ ID NO: 266 - DNA, 3315 bp, Homo Sapien
caggttcaattggttgaaagcggtggtggtctggttcagcctggtggtagcctgcgtctgagctgtgcagcaagcggttttacctttagcgattatgtgattaattgggttcgtcaggcaccgggtaaaggtctggaatgggttagcggtattagctggtcaggtgttaatacccattatgcagatagcgtgaaaggtcgttttaccattagccgtgataatagcaaaaataccctgtatctgcagatgaatagcctgcgtgcagaagataccgcagtttattattgtgcacgtctgggtgcaaccgcaaataatattcgctataaatttatggatgtgtggggtcagggtacactagttaccgttagcagtggtggtggcggcagcggcggtggcggttccggcggtggtggcagcggtggtggtggtagcgatatcgaactgacccagcctccgagcgttagcgttgcaccgggtcagaccgcacgtattagctgtagcggtgatagtctgcgtaataaagtttattggtatcagcagaaaccgggtcaggctccggttctggttatttataaaaataatcgtccgagcggtattccggaacgttttagcggtagcaatagcggtaataccgcaaccctgaccattagcggcacccaggcagaagatgaagccgattattattgtcagagctatgatggtcagaaaagcctggtttttggtggtggcaccaagcttaccgttctggcggcgagcgacgctcacaagagcgaagtggcacataggttcaaagatctgggcgaagagaactttaaggccctcgtcctgatcgctttcgcacagtacctccagcagtctccctttgaagatcacgtgaaactggtcaatgaggtgaccgaatttgccaagacatgcgtggctgatgagagtgcagaaaactgtgacaaatcactgcatactctctttggagataagctgtgcaccgtcgccacactcagagagacttatggggaaatggctgactgttgcgcaaaacaggagcctgaacggaatgagtgtttcctccagcacaaggatgacaacccaaatctgccccgcctcgtgcgacctgaggtcgatgtgatgtgcaccgcctttcatgacaacgaagagacattcctgaagaaatacctgtatgaaattgctcgtaggcacccatacttttatgcccccgagctcctgttctttgcaaagagatacaaagctgccttcactgaatgttgccaggcagctgataaggccgcatgtctcctgcctaaactggacgagctccgggatgaaggtaaggcttccagcgccaaacagcgcctgaagtgcgcttctctccagaagtttggcgagcgagcattcaaagcctgggctgtggcccgtctcagtcagaggtttccaaaggcagaatttgctgaggtctcaaaactggtgaccgacctcacaaaggtccatactgagtgttgccacggagatctgctggaatgtgccgacgatagagcagacctcgctaaatatatctgcgagaatcaggattccattagctctaagctgaaagaatgttgcgagaagcccctcctggaaaagagtcattgtatcgccgaggtggaaaacgacgagatgccagcagatctgccatcactcgctgccgactttgtggaatccaaagatgtctgcaagaattacgcagaggctaaagacgtgttcctggggatgtttctgtatgagtacgcccggcgtcaccccgattatagcgtcgtgctcctgctccgactggcaaagacctacgaaacaactctggagaaatgttgcgctgccgcagaccctcatgaatgttatgctaaggtgttcgatgagtttaagccactcgtcgaagagccccagaacctgattaaacagaattgcgaactgttcgagcagctcggtgaatacaagtttcagaacgccctgctcgtgcgttataccaaaaaggtccctcaggtgtctacaccaactctggtggaggtcagtaggaatctgggcaaagtgggatcaaagtgttgcaaacaccccgaggcaaagagaatgccttgtgctgaagattacctctccgtcgtgctgaaccagctctgcgtgctgcatgaaaagaccccagtcagcgatcgggtgacaaaatgttgcaccgaatctctggtcaatcgccgaccctgtttcagtgccctcgaagtggacgaaacttatgtgcctaaggagtttcaggctgaaacattcacctttcacgccgatatctgcactctgtccgagaaagaaaggcagattaagaaacagacagcactggtcgagctcgtgaagcataaaccaaaggctaccaaggagcagctgaaagccgtcatggacgatttcgcagcttttgtggaaaagtgttgcaaagccgacgataaggagacttgtttcgcagaagaggggaaaaagctcgtggctgccagccaggcagctctgggtctggcggcggcgctggatatcgtgctgacacagagccctgccaccctgtctctgagccctggcgagagagccaccctgagctgccgggccagccagttcatcggctcccgctacctggcctggtatcagcagaagcccggacaggctcccagactgctgatctacggcgccagcaacagagctaccggcgtgcccgccagattttctggcagcggcagcggcaccgacttcaccctgaccatcagcagcctggaacccgaggacttcgccacctactactgccagcagtactacgactacccccagaccttcggccagggcaccaaggtggagatcaagggcggaggcggaagcgggggtggcggaagtggaggcggaggaagcggagggggcggaagccaggtgcaattgaaagagtccggccctgccctggtgaagcctacccagaccctgaccctgacatgcaccttcagcggcttcagcctgagcaacagaggcggcggagtgggctggatcagacagcctcccggcaaggccctggaatggctggcctggatcgactgggacgacgacaagagctacagcaccagcctgaaaacccggctgaccatctccaaggacaccagcaagaaccaggtggtgctcaccatgaccaacatggaccccgtggacaccgccacctattattgcgcccggatgcatctgcccctggtgttcgatagctggggccagggaaccctggtgacagtgtccagcgcggccgcagagaacctgtattttcagggtagccaccatcatcaccatcac

SEQ ID NO: 267 - protein, 1105 aa, Homo Sapien
QVQLVESGGGLVQPGGSLRLSCAASGFTFSDYVMNWVRQAPGKGLEWVAGISWSGVNTHYADSVKGRFTISRDNSKNTLYLQMNSLRAEDTAVYYCARLGATANNIRYKFMDVWGQGTLVTVSSGGGGSGGGGSGGGGSGGGGSDIELTQPPSVSVAPGQTARISCSGDSLRNKVYWYQQKPGQAPVLVIYKNNRPSGIPERFSGSNSGNTATLTISGTQAEDEADYYCQSYDGQKSLVFGGGTKLTVLAASDAHKSEVAHRFKDLGEENFKALVLIAFAQYLQQSPFEDHVKLVNEVTEFAKTCVADESAENCDKSLHTLFGDKLCTVATLRETYGEMADCCAKQEPERNECFLQHKDDNPNLPRLVRPEVDVMCTAFHDNEETFLKKYLYEIARRHPYFYAPELLFFAKRYKAAFTECCQAADKAACLLPKLDELRDEGKASSAKQRLKCASLQKFGERAFKAWAVARLSQRFPKAEFAEVSKLVTDLTKVHTECCHGDLLECADDRADLAKYICENQDSISSKLKECCEKPLLEKSHCIAEVENDEMPADLPSLAADFVESKDVCKNYAEAKDVFLGMFLYEYARRHPDYSVVLLLRLAKTYETTLEKCCAAADPHECYAKVFDEFKPLVEEPQNLIKQNCELFEQLGEYKFQNALLVRYTKKVPQVSTPTLVEVSRNLGKVGSKCCKHPEAKRMPCAEDYLSVVLNQLCVLHEKTPVSDRVTKCCTESLVNRRPCFSALEVDETYVPKEFQAETFTFHADICTLSEKERQIKKQTALVELVKHKPKATKEQLKAVMDDFAAFVEKCCKADDKETCFAEEGKKLVAASQAALGLAAALDIVLTQSPATLSLSPGERATLSCRASQFIGSRYLAWYQQKPGQAPRLLIYGASNRATGVPARFSGSGSGTDFTLTISSLEPEDFATYYCQQYYDYPQTFGQGTKVEIKGGGGSGGGGSGGGGSGGGGSQVQLKESGPALVKPTQTLTLTCTFSGFSLSNRGGGVGWIRQPPGKALEWLAWIDWDDDKSYSTSLKTRLTISKDTSKNQVVLTMTNMDPVDTATYYCARFHLPLVFDSWGQGTLVTVSSAAAENLYFQGSHHHHHH

SEQ ID NO: 268 - DNA, 3315 bp, Homo Sapien
caggttcaattggttgaaagcggtggtggtctggttcagcctggtggtagcctgcgtctgagctgtgcagcaagcggttttacctttagcgattatgtgatgaattgggttcgtcaggcaccgggtaaaggtctggaatgggttgccggtattagctggtcaggtgttaatacccattatgcagatagcgtgaaaggtcgttttaccattagccgtgataatagcaaaaataccctgtatctgcagatgaatagcctgcgtgcagaagataccgcagtttattattgtgcacgtctgggtgcaaccgcaaataatattcgctataaatttatggatgtgtggggtcagggtacactagttaccgttagcagtggtggtggcggcagcggcggtggcggttccggcggtggtggcagcggtggtggtggtagcgatatcgaactgacccagcctccgagcgttagcgttgcaccgggtcagaccgcacgtattagctgtagcggtgatagtctgcgtaataaagtttattggtatcagcagaaaccgggtcaggctccggttctggttatttataaaaataatcgtccgagcggtattccggaacgttttagcggtagcaatagcggtaataccgcaaccctgaccattagcggcacccaggcagaagatgaagccgattattattgtcagagctatgatggtcagaaaagcctggtttttggtggtggcaccaagcttaccgttctggcggcgagcgacgctcacaagagcgaagtggcacataggttcaaagatctgggcgaagagaactttaaggccctcgtcctgatcgctttcgcacagtacctccagcagtctccctttgaagatcacgtgaaactggtcaatgaggtgaccgaatttgccaagacatgcgtggctgatgagagtgcagaaaactgtgacaaatcactgcatactctctttggagataagctgtgcaccgtcgccacactcagagagacttatggggaaatggctgactgttgcgcaaaacaggagcctgaacggaatgagtgtttcctccagcacaaggatgacaacccaaatctgccccgcctcgtgcgacctgaggtcgatgtgatgtgcaccgcctttcatgacaacgaagagacattcctgaagaaatacctgtatgaaattgctcgtaggcacccatacttttatgcccccgagctcctgttctttgcaaagagatacaaagctgccttcactgaatgttgccaggcagctgataaggccgcatgtctcctgcctaaactggacgagctccgggatgaaggtaaggcttccagcgccaaacagcgcctgaagtgcgcttctctccagaagtttggcgagcgagcattcaaagcctgggctgtggcccgtctcagtcagaggtttccaaaggcagaatttgctgaggtctcaaaactggtgaccgacctcacaaaggtccatactgagtgttgccacggagatctgctggaatgtgccgacgatagagcagacctcgctaaatatatctgcgagaatcaggattccattagctctaagctgaaagaatgttgcgagaagcccctcctggaaaagagtcattgtatcgccgaggtggaaaacgacgagatgccagcagatctgccatcactcgctgccgactttgtggaatccaaagatgtctgcaagaattacgcagaggctaaagacgtgttcctggggatgtttctgtatgagtacgcccggcgtcaccccgattatagcgtcgtgctcctgctccgactggcaaagacctacgaaacaactctggagaaatgttgcgctgccgcagaccctcatgaatgttatgctaaggtgttcgatgagtttaagccactcgtcgaagagccccagaacctgattaaacagaattgcgaactgttcgagcagctcggtgaatacaagtttcagaacgccctgctcgtgcgttataccaaaaaggtccctcaggtgtctacaccaactctggtggaggtcagtaggaatctgggcaaagtgggatcaaagtgttgcaaacaccccgaggcaaagagaatgccttgtgctgaagattacctctccgtcgtgctgaaccagctctgcgtgctgcatgaaaagaccccagtcagcgatcgggtgacaaaatgttgcaccgaatctctggtcaatcgccgaccctgtttcagtgccctcgaagtggacgaaacttatgtgcctaaggagtttcaggctgaaacattcacctttcacgccgatatctgcactctgtccgagaaagaaaggcagattaagaaacagacagcactggtcgagctcgtgaagcataaaccaaaggctaccaaggagcagctgaaagccgtcatggacgatttcgcagcttttgtggaaaagtgttgcaaagccgacgataaggagacttgtttcgcagaagaggggaaaaagctcgtggctgccagccaggcagctctgggtctggcggcggcgctggatatcgtgctgacacagagccctgccaccctgtctctgagccctggcgagagagccaccctgagctgccgggccagccagttcatcggctcccgctacctggcctggtatcagcagaagcccggacaggctcccagactgctgatctacggcgccagcaacagagctaccggcgtgcccgccagattttctggcagcggcagcggcaccgacttcaccctgaccatcagcagcctggaacccgaggacttcgccacctactactgccagcagtactacgactacccccagaccttcggccagggcaccaaggtggagatcaagggcggaggcggaagcgggggtggcggaagtggaggcggaggaagcggagggggcggaagccaggtgcaattgaaagagtccggccctgccctggtgaagcctacccagaccctgaccctgacatgcaccttcagcggcttcagcctgagcaacagaggcggcggagtgggctggatcagacagcctcccggcaaggccctggaatggctggcctggatcgactgggacgacgacaagagctacagcaccagcctgaaaacccggctgaccatctccaaggacaccagcaagaaccaggtggtgctcaccatgaccaacatggaccccgtggacaccgccacctattattgcgcccggtttcatctgcccctggtgttcgatagctggggccagggaaccctggtgacagtgtccagcgcggccgcagagaacctgtattttcagggtagccaccatcatcaccatcac

SEQ ID NO: 269 - protein, 1105 aa, Homo Sapien
DIVLTQSPATLSLSPGERATLSCRASQFIGSRYLAWYQQKPGQAPRLLIYGASNRATGVPARFSGSGSGTDFTLTISSLEPEDFATYYCQQYYDYPQTFGQGTKVEIKGGGGSGGGGSGGGGSGGGGSQVQLKESGPALVKPTQTLTLTCTFSGFSLSNRGGGVGWIRQPPGKALEWLAWIDWDDDKSYSTSLKTRLTISKDTSKNQVVLTMTNMDPVDTATYYCARMHLPLVFDSWGQGTLVTVSSAASDAHKSEVAHRFKDLGEENFKALVLIAFAQYLQQSPFEDHVKLVNEVTEFAKTCVADESAENCDKSLHTLFGDKLCTVATLRETYGEMADCCAKQEPERNECFLQHKDDNPNLPRLVRPEVDVMCTAFHDNEETFLKKYLYEIARRHPYFYAPELLFFAKRYKAAFTECCQAADKAACLLPKLDELRDEGKASSAKQRLKCASLQKFGERAFKAWAVARLSQRFPKAEFAEVSKLVTDLTKVHTECCHGDLLECADDRADLAKYICENQDSISSKLKECCEKPLLEKSHCIAEVENDEMPADLPSLAADFVESKDVCKNYAEAKDVFLGMFLYEYARRHPDYSVVLLLRLAKTYETTLEKCCAAADPHECYAKVFDEFKPLVEEPQNLIKQNCELFEQLGEYKFQNALLVRYTKKVPQVSTPTLVEVSRNLGKVGSKCCKHPEAKRMPCAEDYLSVVLNQLCVLHEKTPVSDRVTKCCTESLVNRRPCFSALEVDETYVPKEFQAETFTFHADICTLSEKERQIKKQTALVELVKHKPKATKEQLKAVMDDFAAFVEKCCKADDKETCFAEEGKKLVAASQAALGLAAALQVQLVESGGGLVQPGGSLRLSCAASGFTFSDYVINWVRQAPGKGLEWVSGISWSGVNTHYADSVKGRFTISRDNSKNTLYLQMNSLRAEDTAVYYCARLGATANNIRYKFMDVWGQGTLVTVSSGGGGSGGGGSGGGGSGGGGSDIELTQPPSVSVAPGQTARISCSGDSLRNKVYWYQQKPGQAPVLVIYKNNRPSGIPERFSGSNSGNTATLTISGTQAEDEADYYCQSYDGQKSLVFGGGTKLTVLAAAENLYFQGSHHHHHH

SEQ ID NO: 270 - DNA, 3315 bp, Homo Sapien
gatatcgtgctgacacagagccctgccaccctgtctctgagccctggcgagagagccaccctgagctgccgggccagccagttcatcggctcccgctacctggcctggtatcagcagaagcccggacaggctcccagactgctgatctacggcgccagcaacagagctaccggcgtgcccgccagattttctggcagcggcagcggcaccgacttcaccctgaccatcagcagcctggaacccgaggacttcgccacctactactgccagcagtactacgactacccccagaccttcggccagggcaccaaggtggagatcaagggcggaggcggaagcgggggtggcggaagtggaggcggaggaagcggagggggcggaagccaggtgcaattgaaagagtccggccctgccctggtgaagcctacccagaccctgaccctgacatgcaccttcagcggcttcagcctgagcaacagaggcggcggagtgggctggatcagacagcctcccggcaaggccctggaatggctggcctggatcgactgggacgacgacaagagctacagcaccagcctgaaaacccggctgaccatctccaaggacaccagcaagaaccaggtggtgctcaccatgaccaacatggaccccgtggacaccgccacctattattgcgcccggatgcatctgcccctggtgttcgatagctggggccagggaaccctggtgacagtgtccagcgcggcgagcgacgctcacaagagcgaagtggcacataggttcaaagatctgggcgaagagaactttaaggccctcgtcctgatcgctttcgcacagtacctccagcagtctccctttgaagatcacgtgaaactggtcaatgaggtgaccgaatttgccaagacatgcgtggctgatgagagtgcagaaaactgtgacaaatcactgcatactctctttggagataagctgtgcaccgtcgccacactcagagagacttatggggaaatggctgactgttgcgcaaaacaggagcctgaacggaatgagtgtttcctccagcacaaggatgacaacccaaatctgccccgcctcgtgcgacctgaggtcgatgtgatgtgcaccgcctttcatgacaacgaagagacattcctgaagaaatacctgtatgaaattgctcgtaggcacccatacttttatgcccccgagctcctgttctttgcaaagagatacaaagctgccttcactgaatgttgccaggcagctgataaggccgcatgtctcctgcctaaactggacgagctccgggatgaaggtaaggcttccagcgccaaacagcgcctgaagtgcgcttctctccagaagtttggcgagcgagcattcaaagcctgggctgtggcccgtctcagtcagaggtttccaaaggcagaatttgctgaggtctcaaaactggtgaccgacctcacaaaggtccatactgagtgttgccacggagatctgctggaatgtgccgacgatagagcagacctcgctaaatatatctgcgagaatcaggattccattagctctaagctgaaagaatgttgcgagaagcccctcctggaaaagagtcattgtatcgccgaggtggaaaacgacgagatgccagcagatctgccatcactcgctgccgactttgtggaatccaaagatgtctgcaagaattacgcagaggctaaagacgtgttcctggggatgtttctgtatgagtacgcccggcgtcaccccgattatagcgtcgtgctcctgctccgactggcaaagacctacgaaacaactctggagaaatgttgcgctgccgcagaccctcatgaatgttatgctaaggtgttcgatgagtttaagccactcgtcgaagagccccagaacctgattaaacagaattgcgaactgttcgagcagctcggtgaatacaagtttcagaacgccctgctcgtgcgttataccaaaaaggtccctcaggtgtctacaccaactctggtggaggtcagtaggaatctgggcaaagtgggatcaaagtgttgcaaacaccccgaggcaaagagaatgccttgtgctgaagattacctctccgtcgtgctgaaccagctctgcgtgctgcatgaaaagaccccagtcagcgatcgggtgacaaaatgttgcaccgaatctctggtcaatcgccgaccctgtttcagtgccctcgaagtggacgaaacttatgtgcctaaggagtttcaggctgaaacattcacctttcacgccgatatctgcactctgtccgagaaagaaaggcagattaagaaacagacagcactggtcgagctcgtgaagcataaaccaaaggctaccaaggagcagctgaaagccgtcatggacgatttcgcagcttttgtggaaaagtgttgcaaagccgacgataaggagacttgtttcgcagaagaggggaaaaagctcgtggctgccagccaggcagctctgggtctggcggcggcgctgcaggttcaattggttgaaagcggtggtggtctggttcagcctggtggtagcctgcgtctgagctgtgcagcaagcggttttacctttagcgattatgtgattaattgggttcgtcaggcaccgggtaaaggtctggaatgggttagcggtattagctggtcaggtgttaatacccattatgcagatagcgtgaaaggtcgttttaccattagccgtgataatagcaaaaataccctgtatctgcagatgaatagcctgcgtgcagaagataccgcagtttattattgtgcacgtctgggtgcaaccgcaaataatattcgctataaatttatggatgtgtggggtcagggtacactagttaccgttagcagtggtggtggcggcagcggcggtggcggttccggcggtggtggcagcggtggtggtggtagcgatatcgaactgacccagcctccgagcgttagcgttgcaccgggtcagaccgcacgtattagctgtagcggtgatagtctgcgtaataaagtttattggtatcagcagaaaccgggtcaggctccggttctggttatttataaaaataatcgtccgagcggtattccggaacgttttagcggtagcaatagcggtaataccgcaaccctgaccattagcggcacccaggcagaagatgaagccgattattattgtcagagctatgatggtcagaaaagcctggtttttggtggtggcaccaagcttaccgttctggcggccgcagagaacctgtattttcagggtagccaccatcatcaccatcac

SEQ ID NO: 271 - protein, 1105 aa, Homo Sapien
DIVLTQSPATLSLSPGERATLSCRASQFIGSRYLAWYQQKPGQAPRLLIYGASNRATGVPARFSGSGSGTDFTLTISSLEPEDFATYYCQQYYDYPQTFGQGTKVEIKGGGGSGGGGSGGGGSGGGGSQVQLKESGPALVKPTQTLTLTCTFSGFSLSNRGGGVGWIRQPPGKALEWLAWIDWDDDKSYSTSLKTRLTISKDTSKNQVVLTMTNMDPVDTATYYCARFHLPLVFDSWGQGTLVTVSSAASDAHKSEVAHRFKDLGEENFKALVLIAFAQYLQQSPFEDHVKLVNEVTEFAKTCVADESAENCDKSLHTLFGDKLCTVATLRETYGEMADCCAKQEPERNECFLQHKDDNPNLPRLVRPEVDVMCTAFHDNEETFLKKYLYEIARRHPYFYAPELLFFAKRYKAAFTECCQAADKAACLLPKLDELRDEGKASSAKQRLKCASLQKFGERAFKAWAVARLSQRFPKAEFAEVSKLVTDLTKVHTECCHGDLLECADDRADLAKYICENQDSISSKLKECCEKPLLEKSHCIAEVENDEMPADLPSLAADFVESKDVCKNYAEAKDVFLGMFLYEYARRHPDYSVVLLLRLAKTYETTLEKCCAAADPHECYAKVFDEFKPLVEEPQNLIKQNCELFEQLGEYKFQNALLVRYTKKVPQVSTPTLVEVSRNLGKVGSKCCKHPEAKRMPCAEDYLSVVLNQLCVLHEKTPVSDRVTKCCTESLVNRRPCFSALEVDETYVPKEFQAETFTFHADICTLSEKERQIKKQTALVELVKHKPKATKEQLKAVMDDFAAFVEKCCKADDKETCFAEEGKKLVAASQAALGLAAALQVQLVESGGGLVQPGGSLRLSCAASGFTFSDYVMNWVRQAPGKGLEWVAGISWSGVNTHYADSVKGRFTISRDNSKNTLYLQMNSLRAEDTAVYYCARLGATANNIRYKFMDVWGQGTLVTVSSGGGGSGGGGSGGGGSGGGGSDIELTQPPSVSVAPGQTARISCSGDSLRNKVYWYQQKPGQAPVLVIYKNNRPSGIPERFSGSNSGNTATLTISGTQAEDEADYYCQSYDGQKSLVFGGGTKLTVLAAAENLYFQGSHHHHHH

SEQ ID NO: 272 - DNA, 3315 bp, Homo Sapien
gatatcgtgctgacacagagccctgccaccctgtctctgagccctggcgagagagccaccctgagctgccgggccagccagttcatcggctcccgctacctggcctggtatcagcagaagcccggacaggctcccagactgctgatctacggcgccagcaacagagctaccggcgtgcccgccagattttctggcagcggcagcggcaccgacttcaccctgaccatcagcagcctggaacccgaggacttcgccacctactactgccagcagtactacgactacccccagaccttcggccagggcaccaaggtggagatcaagggcggaggcggaagcgggggtggcggaagtggaggcggaggaagcggagggggcggaagccaggtgcaattgaaagagtccggccctgccctggtgaagcctacccagaccctgaccctgacatgcaccttcagcggcttcagcctgagcaacagaggcggcggagtgggctggatcagacagcctcccggcaaggccctggaatggctggcctggatcgactgggacgacgacaagagctacagcaccagcctgaaaacccggctgaccatctccaaggacaccagcaagaaccaggtggtgctcaccatgaccaacatggaccccgtggacaccgccacctattattgcgcccggtttcatctgcccctggtgttcgatagctggggccagggaaccctggtgacagtgtccagcgcggcgagcgacgctcacaagagcgaagtggcacataggttcaaagatctgggcgaagagaactttaaggccctcgtcctgatcgctttcgcacagtacctccagcagtctccctttgaagatcacgtgaaactggtcaatgaggtgaccgaatttgccaagacatgcgtggctgatgagagtgcagaaaactgtgacaaatcactgcatactctctttggagataagctgtgcaccgtcgccacactcagagagacttatggggaaatggctgactgttgcgcaaaacaggagcctgaacggaatgagtgtttcctccagcacaaggatgacaacccaaatctgccccgcctcgtgcgacctgaggtcgatgtgatgtgcaccgcctttcatgacaacgaagagacattcctgaagaaatacctgtatgaaattgctcgtaggcacccatacttttatgcccccgagctcctgttctttgcaaagagatacaaagctgccttcactgaatgttgccaggcagctgataaggccgcatgtctcctgcctaaactggacgagctccgggatgaaggtaaggcttccagcgccaaacagcgcctgaagtgcgcttctctccagaagtttggcgagcgagcattcaaagcctgggctgtggcccgtctcagtcagaggtttccaaaggcagaatttgctgaggtctcaaaactggtgaccgacctcacaaaggtccatactgagtgttgccacggagatctgctggaatgtgccgacgatagagcagacctcgctaaatatatctgcgagaatcaggattccattagctctaagctgaaagaatgttgcgagaagcccctcctggaaaagagtcattgtatcgccgaggtggaaaacgacgagatgccagcagatctgccatcactcgctgccgactttgtggaatccaaagatgtctgcaagaattacgcagaggctaaagacgtgttcctggggatgtttctgtatgagtacgcccggcgtcaccccgattatagcgtcgtgctcctgctccgactggcaaagacctacgaaacaactctggagaaatgttgcgctgccgcagaccctcatgaatgttatgctaaggtgttcgatgagtttaagccactcgtcgaagagccccagaacctgattaaacagaattgcgaactgttcgagcagctcggtgaatacaagtttcagaacgccctgctcgtgcgttataccaaaaaggtccctcaggtgtctacaccaactctggtggaggtcagtaggaatctgggcaaagtgggatcaaagtgttgcaaacaccccgaggcaaagagaatgccttgtgctgaagattacctctccgtcgtgctgaaccagctctgcgtgctgcatgaaaagaccccagtcagcgatcgggtgacaaaatgttgcaccgaatctctggtcaatcgccgaccctgtttcagtgccctcgaagtggacgaaacttatgtgcctaaggagtttcaggctgaaacattcacctttcacgccgatatctgcactctgtccgagaaagaaaggcagattaagaaacagacagcactggtcgagctcgtgaagcataaaccaaaggctaccaaggagcagctgaaagccgtcatggacgatttcgcagcttttgtggaaaagtgttgcaaagccgacgataaggagacttgtttcgcagaagaggggaaaaagctcgtggctgccagccaggcagctctgggtctggcggcggcgctgcaggttcaattggttgaaagcggtggtggtctggttcagcctggtggtagcctgcgtctgagctgtgcagcaagcggttttacctttagcgattatgtgatgaattgggttcgtcaggcaccgggtaaaggtctggaatgggttgccggtattagctggtcaggtgttaatacccattatgcagatagcgtgaaaggtcgttttaccattagccgtgataatagcaaaaataccctgtatctgcagatgaatagcctgcgtgcagaagataccgcagtttattattgtgcacgtctgggtgcaaccgcaaataatattcgctataaatttatggatgtgtggggtcagggtacactagttaccgttagcagtggtggtggcggcagcggcggtggcggttccggcggtggtggcagcggtggtggtggtagcgatatcgaactgacccagcctccgagcgttagcgttgcaccgggtcagaccgcacgtattagctgtagcggtgatagtctgcgtaataaagtttattggtatcagcagaaaccgggtcaggctccggttctggttatttataaaaataatcgtccgagcggtattccggaacgttttagcggtagcaatagcggtaataccgcaaccctgaccattagcggcacccaggcagaagatgaagccgattattattgtcagagctatgatggtcagaaaagcctggtttttggtggtggcaccaagcttaccgttctggcggccgcagagaacctgtattttcagggtagccaccatcatcaccatcac

SEQ ID NO: 273 - protein, 1120 aa, Homo Sapien [sequence omitted]

SEQ ID NO: 274 - DNA, 3360 bp, Homo Sapien
caggttcaattggttgaaagcggtggtggtctggttcagcctggtggtagcctgcgtctgagctgtgcagcaagcggttttacctttagcgattatgtgatgaattgggttcgtcaggcaccgggtaaaggtctggaatgggttgccggtattagctggtcaggtgttaatacccattatgcagatagcgtgaaaggtcgttttaccattagccgtgataatagcaaaaataccctgtatctgcagatgaatagcctgcgtgcagaagataccgcagtttattattgtgcacgtctgggtgcaaccgcaaataatattcgctataaatttatggatgtgtggggtcagggtacactagttaccgttagcagtggtggtggcggcagcggcggtggcggttccggcggtggtggcagcggtggtggtggtagcgatatcgaactgacccagcctccgagcgttagcgttgcaccgggtcagaccgcacgtattagctgtagcggtgatagtctgcgtaataaagtttattggtatcagcagaaaccgggtcaggctccggttctggttatttataaaaataatcgtccgagcggtattccggaacgttttagcggtagcaatagcggtaataccgcaaccctgaccattagcggcacccaggcagaagatgaagccgattattattgtcagagctatgatggtcagaaaagcctggtttttggtggtggcaccaagcttaccgttctggggggtggcggaagtgggggtgacgctcacaagagcgaagtggcacataggttcaaagatctgggcgaagagaactttaaggccctcgtcctgatcgctttcgcacagtacctccagcagtctccctttgaagatcacgtgaaactggtcaatgaggtgaccgaatttgccaagacatgcgtggctgatgagagtgcagaaaactgtgacaaatcactgcatactctctttggagataagctgtgcaccgtcgccacactcagagagacttatggggaaatggctgactgttgcgcaaaacaggagcctgaacggaatgagtgtttcctccagcacaaggatgacaacccaaatctgccccgcctcgtgcgacctgaggtcgatgtgatgtgcaccgcctttcatgacaacgaagagacattcctgaagaaatacctgtatgaaattgctcgtaggcacccatacttttatgcccccgagctcctgttctttgcaaagagatacaaagctgccttcactgaatgttgccaggcagctgataaggccgcatgtctcctgcctaaactggacgagctccgggatgaaggtaaggcttccagcgccaaacagcgcctgaagtgcgcttctctccagaagtttggcgagcgagcattcaaagcctgggctgtggcccgtctcagtcagaggtttccaaaggcagaatttgctgaggtctcaaaactggtgaccgacctcacaaaggtccatactgagtgttgccacggagatctgctggaatgtgccgacgatagagcagacctcgctaaatatatctgcgagaatcaggattccattagctctaagctgaaagaatgttgcgagaagcccctcctggaaaagagtcattgtatcgccgaggtggaaaacgacgagatgccagcagatctgccatcactcgctgccgactttgtggaatccaaagatgtctgcaagaattacgcagaggctaaagacgtgttcctggggatgtttctgtatgagtacgcccggcgtcaccccgattatagcgtcgtgctcctgctccgactggcaaagacctacgaaacaactctggagaaatgttgcgctgccgcagaccctcatgaatgttatgctaaggtgttcgatgagtttaagccactcgtcgaagagccccagaacctgattaaacagaattgcgaactgttcgagcagctcggtgaatacaagtttcagaacgccctgctcgtgcgttataccaaaaaggtccctcaggtgtctacaccaactctggtggaggtcagtaggaatctgggcaaagtgggatcaaagtgttgcaaacaccccgaggcaaagagaatgccttgtgctgaagattacctctccgtcgtgctgaaccagctctgcgtgctgcatgaaaagaccccagtcagcgatcgggtgacaaaatgttgcaccgaatctctggtcaatcgccgaccctgtttcagtgccctcgaagtggacgaaacttatgtgcctaaggagtttcaggctgaaacattcacctttcacgccgatatctgcactctgtccgagaaagaaaggcagattaagaaacagacagcactggtcgagctcgtgaagcataaaccaaaggctaccaaggagcagctgaaagccgtcatggacgatttcgcagcttttgtggaaaagtgttgcaaagccgacgataaggagacttgtttcgcagaagaggggaaaaagctcgtggctgccagccaggcagctctgggtctggggggtggcggaagtgggggtggcggaagtgggggtggcggaagtgatatcgtgctgacacagagccctgccaccctgtctctgagccctggcgagagagccaccctgagctgccgggccagccagttcatcggctcccgctacctggcctggtatcagcagaagcccggacaggctcccagactgctgatctacggcgccagcaacagagctaccggcgtgcccgccagattttctggcagcggcagcggcaccgacttcaccctgaccatcagcagcctggaacccgaggacttcgccacctactactgccagcagtactacgactacccccagaccttcggccagggcaccaaggtggagatcaagggcggaggcggaagcgggggtggcggaagtggaggcggaggaagcggagggggcggaagccaggtgcaattgaaagagtccggccctgccctggtgaagcctacccagaccctgaccctgacatgcaccttcagcggcttcagcctgagcaacagaggcggcggagtgggctggatcagacagcctcccggcaaggccctggaatggctggcctggatcgactgggacgacgacaagagctacagcaccagcctgaaaacccggctgaccatctccaaggacaccagcaagaaccaggtggtgctcaccatgaccaacatggaccccgtggacaccgccacctattattgcgcccggtttcatctgcccctggtgttcgatagctggggccagggaaccctggtgacagtgtccagcgcggccgcagagaacctgtattttcagggtagccaccatcatcaccatcac

SEQ ID NO: 275 - protein, 1120 aa, Homo Sapien
DIVLTQSPATLSLSPGERATLSCRASQFIGSRYLAWYQQKPGQAPRLLIYGASNRATGVPARFSGSGSGTDFTLTISSLEPEDFATYYCQQYYDYPQTFGQGTKVEIKGGGGSGGGGSGGGGSGGGGSQVQLKESGPALVKPTQTLTLTCTFSGFSLSNRGGGVGWIRQPPGKALEWLAWIDWDDDKSYSTSLKTRLTISKDTSKNQVVLTMTNMDPVDTATYYCARFHLPLVFDSWGQGTLVTVSSGGGGSGGDAHKSEVAHRFKDLGEENFKALVLIAFAQYLQQSPFEDHVKLVNEVTEFAKTCVADESAENCDKSLHTLFGDKLCTVATLRETYGEMADCCAKQEPERNECFLQHKDDNPNLPRLVRPEVDVMCTAFHDNEETFLKKYLYEIARRHPYFYAPELLFFAKRYKAAFTECCQAADKAACLLPKLDELRDEGKASSAKQRLKCASLQKFGERAFKAWAVARLSQRFPKAEFAEVSKLVTDLTKVHTECCHGDLLECADDRADLAKYICENQDSISSKLKECCEKPLLEKSHCIAEVENDEMPADLPSLAADFVESKDVCKNYAEAKDVFLGMFLYEYARRHPDYSVVLLLRLAKTYETTLEKCCAAADPHECYAKVFDEFKPLVEEPQNLIKQNCELFEQLGEYKFQNALLVRYTKKVPQVSTPTLVEVSRNLGKVGSKCCKHPEAKRMPCAEDYLSVVLNQLCVLHEKTPVSDRVTKCCTESLVNRRPCFSALEVDETYVPKEFQAETFTFHADICTLSEKERQIKKQTALVELVKHKPKATKEQLKAVMDDFAAFVEKCCKADDKETCFAEEGKKLVAASQAALGLGGGGSGGGGSGGGGSQVQLVESGGGLVQPGGSLRLSCAASGFTFSDYVMNWVRQAPGKGLEWVAGISWSGVNTHYADSVKGRFTISRDNSKNTLYLQMNSLRAEDTAVYYCARLGATANNIRYKFMDVWGQGTLVTVSSGGGGSGGGGSGGGGSGGGGSDIELTQPPSVSVAPGQTARISCSGDSLRNKVYWYQQKPGQAPVLVIYKNNRPSGIPERFSGSNSGNTATLTISGTQAEDEADYYCQSYDGQKSLVFGGGTKLTVLAAAENLYFQGSHHHHHH

SEQ ID NO: 276 - DNA, 3360 bp, Homo Sapien
gatatcgtgctgacacagagccctgccaccctgtctctgagccctggcgagagagccaccctgagctgccgggccagccagttcatcggctcccgctacctggcctggtatcagcagaagcccggacaggctcccagactgctgatctacggcgccagcaacagagctaccggcgtgcccgccagattttctggcagcggcagcggcaccgacttcaccctgaccatcagcagcctggaacccgaggacttcgccacctactactgccagcagtactacgactacccccagaccttcggccagggcaccaaggtggagatcaagggcggaggcggaagcgggggtggcggaagtggaggcggaggaagcggagggggcggaagccaggtgcaattgaaagagtccggccctgccctggtgaagcctacccagaccctgaccctgacatgcaccttcagcggcttcagcctgagcaacagaggcggcggagtgggctggatcagacagcctcccggcaaggccctggaatggctggcctggatcgactgggacgacgacaagagctacagcaccagcctgaaaacccggctgaccatctccaaggacaccagcaagaaccaggtggtgctcaccatgaccaacatggaccccgtggacaccgccacctattattgcgcccggtttcatctgcccctggtgttcgatagctggggccagggaaccctggtgacagtgtccagcgggggtggcggaagtgggggtgacgctcacaagagcgaagtggcacataggttcaaagatctgggcgaagagaactttaaggccctcgtcctgatcgctttcgcacagtacctccagcagtctccctttgaagatcacgtgaaactggtcaatgaggtgaccgaatttgccaagacatgcgtggctgatgagagtgcagaaaactgtgacaaatcactgcatactctctttggagataagctgtgcaccgtcgccacactcagagagacttatggggaaatggctgactgttgcgcaaaacaggagcctgaacggaatgagtgtttcctccagcacaaggatgacaacccaaatctgccccgcctcgtgcgacctgaggtcgatgtgatgtgcaccgcctttcatgacaacgaagagacattcctgaagaaatacctgtatgaaattgctcgtaggcacccatacttttatgcccccgagctcctgttctttgcaaagagatacaaagctgccttcactgaatgttgccaggcagctgataaggccgcatgtctcctgcctaaactggacgagctccgggatgaaggtaaggcttccagcgccaaacagcgcctgaagtgcgcttctctccagaagtttggcgagcgagcattcaaagcctgggctgtggcccgtctcagtcagaggtttccaaaggcagaatttgctgaggtctcaaaactggtgaccgacctcacaaaggtccatactgagtgttgccacggagatctgctggaatgtgccgacgatagagcagacctcgctaaatatatctgcgagaatcaggattccattagctctaagctgaaagaatgttgcgagaagcccctcctggaaaagagtcattgtatcgccgaggtggaaaacgacgagatgccagcagatctgccatcactcgctgccgactttgtggaatccaaagatgtctgcaagaattacgcagaggctaaagacgtgttcctggggatgtttctgtatgagtacgcccggcgtcaccccgattatagcgtcgtgctcctgctccgactggcaaagacctacgaaacaactctggagaaatgttgcgctgccgcagaccctcatgaatgttatgctaaggtgttcgatgagtttaagccactcgtcgaagagccccagaacctgattaaacagaattgcgaactgttcgagcagctcggtgaatacaagtttcagaacgccctgctcgtgcgttataccaaaaaggtccctcaggtgtctacaccaactctggtggaggtcagtaggaatctgggcaaagtgggatcaaagtgttgcaaacaccccgaggcaaagagaatgccttgtgctgaagattacctctccgtcgtgctgaaccagctctgcgtgctgcatgaaaagaccccagtcagcgatcgggtgacaaaatgttgcaccgaatctctggtcaatcgccgaccctgtttcagtgccctcgaagtggacgaaacttatgtgcctaaggagtttcaggctgaaacattcacctttcacgccgatatctgcactctgtccgagaaagaaaggcagattaagaaacagacagcactggtcgagctcgtgaagcataaaccaaaggctaccaaggagcagctgaaagccgtcatggacgatttcgcagcttttgtggaaaagtgttgcaaagccgacgataaggagacttgtttcgcagaagaggggaaaaagctcgtggctgccagccaggcagctctgggtctggggggtggcggaagtgggggtggcggaagtgggggtggcggaagtcaggttcaattggttgaaagcggtggtggtctggttcagcctggtggtagcctgcgtctgagctgtgcagcaagcggttttacctttagcgattatgtgatgaattgggttcgtcaggcaccgggtaaaggtctggaatgggttgccggtattagctggtcaggtgttaatacccattatgcagatagcgtgaaaggtcgttttaccattagccgtgataatagcaaaaataccctgtatctgcagatgaatagcctgcgtgcagaagataccgcagtttattattgtgcacgtctgggtgcaaccgcaaataatattcgctataaatttatggatgtgtggggtcagggtacactagttaccgttagcagtggtggtggcggcagcggcggtggcggttccggcggtggtggcagcggtggtggtggtagcgatatcgaactgacccagcctccgagcgttagcgttgcaccgggtcagaccgcacgtattagctgtagcggtgatagtctgcgtaataaagtttattggtatcagcagaaaccgggtcaggctccggttctggttatttataaaaataatcgtccgagcggtattccggaacgttttagcggtagcaatagcggtaataccgcaaccctgaccattagcggcacccaggcagaagatgaagccgattattattgtcagagctatgatggtcagaaaagcctggtttttggtggtggcaccaagcttaccgttctggcggccgcagagaacctgtattttcagggtagccaccatcatcaccatcac

SEQ ID NO: 277 - protein, 1091 aa, Homo Sapien
QVQLVESGGGLVQPGGSLRLSCAASGFTFSDYVMNWVRQAPGKGLEWVAGISWSGVNTHYADSVKGRFTISRDNSKNTLYLQMNSLRAEDTAVYYCARLGATANNIRYKFMDVWGQGTLVTVSSGGGGSGGGGSGGGGSGGGGSDIELTQPPSVSVAPGQTARISCSGDSLRNKVYWYQQKPGQAPVLVIYKNNRPSGIPERFSGSNSGNTATLTISGTQAEDEADYYCQSYDGQKSLVFGGGTKLTVLAASDAHKSEVAHRFKDLGEENFKALVLIAFAQYLQQSPFEDHVKLVNEVTEFAKTCVADESAENCDKSLHTLFGDKLCTVATLRETYGEMADCCAKQEPERNECFLQHKDDNPNLPRLVRPEVDVMCTAFHDNEETFLKKYLYEIARRHPYFYAPELLFFAKRYKAAFTECCQAADKAACLLPKLDELRDEGKASSAKQRLKCASLQKFGERAFKAWAVARLSQRFPKAEFAEVSKLVTDLTKVHTECCHGDLLECADDRADLAKYICENQDSISSKLKECCEKPLLEKSHCIAEVENDEMPADLPSLAADFVESKDVCKNYAEAKDVFLGMFLYEYARRHPDYSVVLLLRLAKTYETTLEKCCAAADPHECYAKVFDEFKPLVEEPQNLIKQNCELFEQLGEYKFQNALLVRYTKKVPQVSTPTLVEVSRNLGKVGSKCCKHPEAKRMPCAEDYLSVVLNQLCVLHEKTPVSDRVTKCCTESLVNRRPCFSALEVDETYVPKEFQAETFTFHADICTLSEKERQIKKQTALVELVKHKPKATKEQLKAVMDDFAAFVEKCCKADDKETCFAEEGKKLVAASQAALGLAAALDIVLTQSPATLSLSPGERATLSCRASQFIGSRYLAWYQQKPGQAPRLLIYGASNRATGVPARFSGSGSGTDFTLTISSLEPEDFATYYCQQYYDYPQTFGQGTKVEIKGGGGSGGGGSGGGGSGGGGSQVQLKESGPALVKPTQTLTLTCTFSGFSLSNRGGGVGWIRQPPGKALEWLAWIDWDDDKSYSTSLKTRLTISKDTSKNQVVLTMTNMDPVDTATYYCARFHLPLVFDSWGQGTLVTVSSAAA

SEQ ID NO: 278 - DNA, 3273 bp, Homo Sapien
caggttcaattggttgaaagcggtggtggtctggttcagcctggtggtagcctgcgtctgagctgtgcagcaagcggttttacctttagcgattatgtgatgaattgggttcgtcaggcaccgggtaaaggtctggaatgggttgccggtattagctggtcaggtgttaatacccattatgcagatagcgtgaaaggtcgttttaccattagccgtgataatagcaaaaataccctgtatctgcagatgaatagcctgcgtgcagaagataccgcagtttattattgtgcacgtctgggtgcaaccgcaaataatattcgctataaatttatggatgtgtggggtcagggtacactagttaccgttagcagtggtggtggcggcagcggcggtggcggttccggcggtggtggcagcggtggtggtggtagcgatatcgaactgacccagcctccgagcgttagcgttgcaccgggtcagaccgcacgtattagctgtagcggtgatagtctgcgtaataaagtttattggtatcagcagaaaccgggtcaggctccggttctggttatttataaaaataatcgtccgagcggtattccggaacgttttagcggtagcaatagcggtaataccgcaaccctgaccattagcggcacccaggcagaagatgaagccgattattattgtcagagctatgatggtcagaaaagcctggtttttggtggtggcaccaagcttaccgttctggcggcgagcgacgctcacaagagcgaagtggcacataggttcaaagatctgggcgaagagaactttaaggccctcgtcctgatcgctttcgcacagtacctccagcagtctccctttgaagatcacgtgaaactggtcaatgaggtgaccgaatttgccaagacatgcgtggctgatgagagtgcagaaaactgtgacaaatcactgcatactctctttggagataagctgtgcaccgtcgccacactcagagagacttatggggaaatggctgactgttgcgcaaaacaggagcctgaacggaatgagtgtttcctccagcacaaggatgacaacccaaatctgccccgcctcgtgcgacctgaggtcgatgtgatgtgcaccgcctttcatgacaacgaagagacattcctgaagaaatacctgtatgaaattgctcgtaggcacccatacttttatgcccccgagctcctgttctttgcaaagagatacaaagctgccttcactgaatgttgccaggcagctgataaggccgcatgtctcctgcctaaactggacgagctccgggatgaaggtaaggcttccagcgccaaacagcgcctgaagtgcgcttctctccagaagtttggcgagcgagcattcaaagcctgggctgtggcccgtctcagtcagaggtttccaaaggcagaatttgctgaggtctcaaaactggtgaccgacctcacaaaggtccatactgagtgttgccacggagatctgctggaatgtgccgacgatagagcagacctcgctaaatatatctgcgagaatcaggattccattagctctaagctgaaagaatgttgcgagaagcccctcctggaaaagagtcattgtatcgccgaggtggaaaacgacgagatgccagcagatctgccatcactcgctgccgactttgtggaatccaaagatgtctgcaagaattacgcagaggctaaagacgtgttcctggggatgtttctgtatgagtacgcccggcgtcaccccgattatagcgtcgtgctcctgctccgactggcaaagacctacgaaacaactctggagaaatgttgcgctgccgcagaccctcatgaatgttatgctaaggtgttcgatgagtttaagccactcgtcgaagagccccagaacctgattaaacagaattgcgaactgttcgagcagctcggtgaatacaagtttcagaacgccctgctcgtgcgttataccaaaaaggtccctcaggtgtctacaccaactctggtggaggtcagtaggaatctgggcaaagtgggatcaaagtgttgcaaacaccccgaggcaaagagaatgccttgtgctgaagattacctctccgtcgtgctgaaccagctctgcgtgctgcatgaaaagaccccagtcagcgatcgggtgacaaaatgttgcaccgaatctctggtcaatcgccgaccctgtttcagtgccctcgaagtggacgaaacttatgtgcctaaggagtttcaggctgaaacattcacctttcacgccgatatctgcactctgtccgagaaagaaaggcagattaagaaacagacagcactggtcgagctcgtgaagcataaaccaaaggctaccaaggagcagctgaaagccgtcatggacgatttcgcagcttttgtggaaaagtgttgcaaagccgacgataaggagacttgtttcgcagaagaggggaaaaagctcgtggctgccagccaggcagctctgggtctggcggcggcgctggatatcgtgctgacacagagccctgccaccctgtctctgagccctggcgagagagccaccctgagctgccgggccagccagttcatcggctcccgctacctggcctggtatcagcagaagcccggacaggctcccagactgctgatctacggcgccagcaacagagctaccggcgtgcccgccagattttctggcagcggcagcggcaccgacttcaccctgaccatcagcagcctggaacccgaggacttcgccacctactactgccagcagtactacgactacccccagaccttcggccagggcaccaaggtggagatcaagggcggaggcggaagcgggggtggcggaagtggaggcggaggaagcggagggggcggaagccaggtgcaattgaaagagtccggccctgccctggtgaagcctacccagaccctgaccctgacatgcaccttcagcggcttcagcctgagcaacagaggcggcggagtgggctggatcagacagcctcccggcaaggccctggaatggctggcctggatcgactgggacgacgacaagagctacagcaccagcctgaaaacccggctgaccatctccaaggacaccagcaagaaccaggtggtgctcaccatgaccaacatggaccccgtggacaccgccacctattattgcgcccggtttcatctgcccctggtgttcgatagctggggccagggaaccctggtgacagtgtccagcgcggccgca

SEQ ID NO: 279 - protein, 1091 aa, Homo Sapien
DIVLTQSPATLSLSPGERATLSCRASQFIGSRYLAWYQQKPGQAPRLLIYGASNRATGVPARFSGSGSGTDFTLTISSLEPEDFATYYCQQYYDYPQTFGQGTKVEIKGGGGSGGGGSGGGGSGGGGSQVQLKESGPALVKPTQTLTLTCTFSGFSLSNRGGGVGWIRQPPGKALEWLAWIDWDDDKSYSTSLKTRLTISKDTSKNQVVLTMTNMDPVDTATYYCARFHLPLVFDSWGQGTLVTVSSAASDAHKSEVAHRFKDLGEENFKALVLIAFAQYLQQSPFEDHVKLVNEVTEFAKTCVADESAENCDKSLHTLFGDKLCTVATLRETYGEMADCCAKQEPERNECFLQHKDDNPNLPRLVRPEVDVMCTAFHDNEETFLKKYLYEIARRHPYFYAPELLFFAKRYKAAFTECCQAADKAACLLPKLDELRDEGKASSAKQRLKCASLQKFGERAFKAWAVARLSQRFPKAEFAEVSKLVTDLTKVHTECCHGDLLECADDRADLAKYICENQDSISSKLKECCEKPLLEKSHCIAEVENDEMPADLPSLAADFVESKDVCKNYAEAKDVFLGMFLYEYARRHPDYSVVLLLRLAKTYETTLEKCCAAADPHECYAKVFDEFKPLVEEPQNLIKQNCELFEQLGEYKFQNALLVRYTKKVPQVSTPTLVEVSRNLGKVGSKCCKHPEAKRMPCAEDYLSVVLNQLCVLHEKTPVSDRVTKCCTESLVNRRPCFSALEVDETYVPKEFQAETFTFHADICTLSEKERQIKKQTALVELVKHKPKATKEQLKAVMDDFAAFVEKCCKADDKETCFAEEGKKLVAASQAALGLAAALQVQLVESGGGLVQPGGSLRLSCAASGFTFSDYVMNWVRQAPGKGLEWVAGISWSGVNTHYADSVKGRFTISRDNSKNTLYLQMNSLRAEDTAVYYCARLGATANNIRYKFMDVWGQGTLVTVSSGGGGSGGGGSGGGGSGGGGSDIELTQPPSVSVAPGQTARISCSGDSLRNKVYWYQQKPGQAPVLVIYKNNRPSGIPERFSGSNSGNTATLTISGTQAEDEADYYCQSYDGQKSLVFGGGTKLTVLAAA

SEQ ID NO: 280 - DNA, 3273 bp, Homo Sapien
gatatcgtgctgacacagagccctgccaccctgtctctgagccctggcgagagagccaccctgagctgccgggccagccagttcatcggctcccgctacctggcctggtatcagcagaagcccggacaggctcccagactgctgatctacggcgccagcaacagagctaccggcgtgcccgccagattttctggcagcggcagcggcaccgacttcaccctgaccatcagcagcctggaacccgaggacttcgccacctactactgccagcagtactacgactacccccagaccttcggccagggcaccaaggtggagatcaagggcggaggcggaagcgggggtggcggaagtggaggcggaggaagcggagggggcggaagccaggtgcaattgaaagagtccggccctgccctggtgaagcctacccagaccctgaccctgacatgcaccttcagcggcttcagcctgagcaacagaggcggcggagtgggctggatcagacagcctcccggcaaggccctggaatggctggcctggatcgactgggacgacgacaagagctacagcaccagcctgaaaacccggctgaccatctccaaggacaccagcaagaaccaggtggtgctcaccatgaccaacatggaccccgtggacaccgccacctattattgcgcccggtttcatctgcccctggtgttcgatagctggggccagggaaccctggtgacagtgtccagcgcggcgagcgacgctcacaagagcgaagtggcacataggttcaaagatctgggcgaagagaactttaaggccctcgtcctgatcgctttcgcacagtacctccagcagtctccctttgaagatcacgtgaaactggtcaatgaggtgaccgaatttgccaagacatgcgtggctgatgagagtgcagaaaactgtgacaaatcactgcatactctctttggagataagctgtgcaccgtcgccacactcagagagacttatggggaaatggctgactgttgcgcaaaacaggagcctgaacggaatgagtgtttcctccagcacaaggatgacaacccaaatctgccccgcctcgtgcgacctgaggtcgatgtgatgtgcaccgcctttcatgacaacgaagagacattcctgaagaaatacctgtatgaaattgctcgtaggcacccatacttttatgcccccgagctcctgttctttgcaaagagatacaaagctgccttcactgaatgttgccaggcagctgataaggccgcatgtctcctgcctaaactggacgagctccgggatgaaggtaaggcttccagcgccaaacagcgcctgaagtgcgcttctctccagaagtttggcgagcgagcattcaaagcctgggctgtggcccgtctcagtcagaggtttccaaaggcagaatttgctgaggtctcaaaactggtgaccgacctcacaaaggtccatactgagtgttgccacggagatctgctggaatgtgccgacgatagagcagacctcgctaaatatatctgcgagaatcaggattccattagctctaagctgaaagaatgttgcgagaagcccctcctggaaaagagtcattgtatcgccgaggtggaaaacgacgagatgccagcagatctgccatcactcgctgccgactttgtggaatccaaagatgtctgcaagaattacgcagaggctaaagacgtgttcctggggatgtttctgtatgagtacgcccggcgtcaccccgattatagcgtcgtgctcctgctccgactggcaaagacctacgaaacaactctggagaaatgttgcgctgccgcagaccctcatgaatgttatgctaaggtgttcgatgagtttaagccactcgtcgaagagccccagaacctgattaaacagaattgcgaactgttcgagcagctcggtgaatacaagtttcagaacgccctgctcgtgcgttataccaaaaaggtccctcaggtgtctacaccaactctggtggaggtcagtaggaatctgggcaaagtgggatcaaagtgttgcaaacaccccgaggcaaagagaatgccttgtgctgaagattacctctccgtcgtgctgaaccagctctgcgtgctgcatgaaaagaccccagtcagcgatcgggtgacaaaatgttgcaccgaatctctggtcaatcgccgaccctgtttcagtgccctcgaagtggacgaaacttatgtgcctaaggagtttcaggctgaaacattcacctttcacgccgatatctgcactctgtccgagaaagaaaggcagattaagaaacagacagcactggtcgagctcgtgaagcataaaccaaaggctaccaaggagcagctgaaagccgtcatggacgatttcgcagcttttgtggaaaagtgttgcaaagccgacgataaggagacttgtttcgcagaagaggggaaaaagctcgtggctgccagccaggcagctctgggtctggcggcggcgctgcaggttcaattggttgaaagcggtggtggtctggttcagcctggtggtagcctgcgtctgagctgtgcagcaagcggttttacctttagcgattatgtgatgaattgggttcgtcaggcaccgggtaaaggtctggaatgggttgccggtattagctggtcaggtgttaatacccattatgcagatagcgtgaaaggtcgttttaccattagccgtgataatagcaaaaataccctgtatctgcagatgaatagcctgcgtgcagaagataccgcagtttattattgtgcacgtctgggtgcaaccgcaaataatattcgctataaatttatggatgtgtggggtcagggtacactagttaccgttagcagtggtggtggcggcagcggcggtggcggttccggcggtggtggcagcggtggtggtggtagcgatatcgaactgacccagcctccgagcgttagcgttgcaccgggtcagaccgcacgtattagctgtagcggtgatagtctgcgtaataaagtttattggtatcagcagaaaccgggtcaggctccggttctggttatttataaaaataatcgtccgagcggtattccggaacgttttagcggtagcaatagcggtaataccgcaaccctgaccattagcggcacccaggcagaagatgaagccgattattattgtcagagctatgatggtcagaaaagcctggtttttggtggtggcaccaagcttaccgttctggcggccgca

SEQ ID NO: 281 - protein, 1098 aa, Homo Sapien
DIVLTQSPATLSLSPGERATLSCRASQFIGSRYLAWYQQKPGQAPRLLIYGASNRATGVPARFSGSGSGTDFTLTISSLEPEDFATYYCQQYYDYPQTFGQGTKVEIKGGGGSGGGGSGGGGSGGGGSQVQLKESGPALVKPTQTLTLTCTFSGFSLSNRGGGVGWIRQPPGKALEWLAWIDWDDDKSYSTSLKTRLTISKDTSKNQVVLTMTNMDPVDTATYYCARFHLPLVFDSWGQGTLVTVSSDAHKSEVAHRFKDLGEENFKALVLIAFAQYLQQSPFEDHVKLVNEVTEFAKTCVADESAENCDKSLHTLFGDKLCTVATLRETYGEMADCCAKQEPERNECFLQHKDDNPNLPRLVRPEVDVMCTAFHDNEETFLKKYLYEIARRHPYFYAPELLFFAKRYKAAFTECCQAADKAACLLPKLDELRDEGKASSAKQRLKCASLQKFGERAFKAWAVARLSQRFPKAEFAEVSKLVTDLTKVHTECCHGDLLECADDRADLAKYICENQDSISSKLKECCEKPLLEKSHCIAEVENDEMPADLPSLAADFVESKDVCKNYAEAKDVFLGMFLYEYARRHPDYSVVLLLRLAKTYETTLEKCCAAADPHECYAKVFDEFKPLVEEPQNLIKQNCELFEQLGEYKFQNALLVRYTKKVPQVSTPTLVEVSRNLGKVGSKCCKHPEAKRMPCAEDYLSVVLNQLCVLHEKTPVSDRVTKCCTESLVNRRPCFSALEVDETYVPKEFQAETFTFHADICTLSEKERQIKKQTALVELVKHKPKATKEQLKAVMDDFAAFVEKCCKADDKETCFAEEGKKLVAASQAALGLQVQLVESGGGLVQPGGSLRLSCAASGFTFSDYVMNWVRQAPGKGLEWVAGISWSGVNTHYADSVKGRFTISRDNSKNTLYLQMNSLRAEDTAVYYCARLGATANNIRYKFMDVWGQGTLVTVSSGGGGSGGGGSGGGGSGGGGSDIELTQPPSVSVAPGQTARISCSGDSLRNKVYWYQQKPGQAPVLVIYKNNRPSGIPERFSGSNSGNTATLTISGTQAEDEADYYCQSYDGQKSLVFGGGTKLTVLAAAENLYFQGSHHHHHH

SEQ ID NO: 282 - DNA, 3294 bp, Homo Sapien
gatatcgtgctgacacagagccctgccaccctgtctctgagccctggcgagagagccaccctgagctgccgggccagccagttcatcggctcccgctacctggcctggtatcagcagaagcccggacaggctcccagactgctgatctacggcgccagcaacagagctaccggcgtgcccgccagattttctggcagcggcagcggcaccgacttcaccctgaccatcagcagcctggaacccgaggacttcgccacctactactgccagcagtactacgactacccccagaccttcggccagggcaccaaggtggagatcaagggcggaggcggaagcgggggtggcggaagtggaggcggaggaagcggagggggcggaagccaggtgcaattgaaagagtccggccctgccctggtgaagcctacccagaccctgaccctgacatgcaccttcagcggcttcagcctgagcaacagaggcggcggagtgggctggatcagacagcctcccggcaaggccctggaatggctggcctggatcgactgggacgacgacaagagctacagcaccagcctgaaaacccggctgaccatctccaaggacaccagcaagaaccaggtggtgctcaccatgaccaacatggaccccgtggacaccgccacctattattgcgcccggtttcatctgcccctggtgttcgatagctggggccagggaaccctggtgacagtgtccagcgacgctcacaagagcgaagtggcacataggttcaaagatctgggcgaagagaactttaaggccctcgtcctgatcgctttcgcacagtacctccagcagtctccctttgaagatcacgtgaaactggtcaatgaggtgaccgaatttgccaagacatgcgtggctgatgagagtgcagaaaactgtgacaaatcactgcatactctctttggagataagctgtgcaccgtcgccacactcagagagacttatggggaaatggctgactgttgcgcaaaacaggagcctgaacggaatgagtgtttcctccagcacaaggatgacaacccaaatctgccccgcctcgtgcgacctgaggtcgatgtgatgtgcaccgcctttcatgacaacgaagagacattcctgaagaaatacctgtatgaaattgctcgtaggcacccatacttttatgcccccgagctcctgttctttgcaaagagatacaaagctgccttcactgaatgttgccaggcagctgataaggccgcatgtctcctgcctaaactggacgagctccgggatgaaggtaaggcttccagcgccaaacagcgcctgaagtgcgcttctctccagaagtttggcgagcgagcattcaaagcctgggctgtggcccgtctcagtcagaggtttccaaaggcagaatttgctgaggtctcaaaactggtgaccgacctcacaaaggtccatactgagtgttgccacggagatctgctggaatgtgccgacgatagagcagacctcgctaaatatatctgcgagaatcaggattccattagctctaagctgaaagaatgttgcgagaagcccctcctggaaaagagtcattgtatcgccgaggtggaaaacgacgagatgccagcagatctgccatcactcgctgccgactttgtggaatccaaagatgtctgcaagaattacgcagaggctaaagacgtgttcctggggatgtttctgtatgagtacgcccggcgtcaccccgattatagcgtcgtgctcctgctccgactggcaaagacctacgaaacaactctggagaaatgttgcgctgccgcagaccctcatgaatgttatgctaaggtgttcgatgagtttaagccactcgtcgaagagccccagaacctgattaaacagaattgcgaactgttcgagcagctcggtgaatacaagtttcagaacgccctgctcgtgcgttataccaaaaaggtccctcaggtgtctacaccaactctggtggaggtcagtaggaatctgggcaaagtgggatcaaagtgttgcaaacaccccgaggcaaagagaatgccttgtgctgaagattacctctccgtcgtgctgaaccagctctgcgtgctgcatgaaaagaccccagtcagcgatcgggtgacaaaatgttgcaccgaatctctggtcaatcgccgaccctgtttcagtgccctcgaagtggacgaaacttatgtgcctaaggagtttcaggctgaaacattcacctttcacgccgatatctgcactctgtccgagaaagaaaggcagattaagaaacagacagcactggtcgagctcgtgaagcataaaccaaaggctaccaaggagcagctgaaagccgtcatggacgatttcgcagcttttgtggaaaagtgttgcaaagccgacgataaggagacttgtttcgcagaagaggggaaaaagctcgtggctgccagccaggcagctctgggtctgcaggttcaattggttgaaagcggtggtggtctggttcagcctggtggtagcctgcgtctgagctgtgcagcaagcggttttacctttagcgattatgtgatgaattgggttcgtcaggcaccgggtaaaggtctggaatgggttgccggtattagctggtcaggtgttaatacccattatgcagatagcgtgaaaggtcgttttaccattagccgtgataatagcaaaaataccctgtatctgcagatgaatagcctgcgtgcagaagataccgcagtttattattgtgcacgtctgggtgcaaccgcaaataatattcgctataaatttatggatgtgtggggtcagggtacactagttaccgttagcagtggtggtggcggcagcggcggtggcggttccggcggtggtggcagcggtggtggtggtagcgatatcgaactgacccagcctccgagcgttagcgttgcaccgggtcagaccgcacgtattagctgtagcggtgatagtctgcgtaataaagtttattggtatcagcagaaaccgggtcaggctccggttctggttatttataaaaataatcgtccgagcggtattccggaacgttttagcggtagcaatagcggtaataccgcaaccctgaccattagcggcacccaggcagaagatgaagccgattattattgtcagagctatgatggtcagaaaagcctggtttttggtggtggcaccaagcttaccgttctggcggccgcagagaacctgtattttcagggtagccaccatcatcaccatcac

SEQ ID NO: 283 - protein, 1106 aa, Homo Sapien
DIVLTQSPATLSLSPGERATLSCRASQFIGSRYLAWYQQKPGQAPRLLIYGASNRATGVPARFSGSGSGTDFTLTISSLEPEDFATYYCQQYYDYPQTFGQGTKVEIKGGGGSGGGGSGGGGSGGGGSQVQLKESGPALVKPTQTLTLTCTFSGFSLSNRGGGVGWIRQPPGKALEWLAWIDWDDDKSYSTSLKTRLTISKDTSKNQVVLTMTNMDPVDTATYYCARFHLPLVFDSWGQGTLVTVSSKTHTDAHKSEVAHRFKDLGEENFKALVLIAFAQYLQQSPFEDHVKLVNEVTEFAKTCVADESAENCDKSLHTLFGDKLCTVATLRETYGEMADCCAKQEPERNECFLQHKDDNPNLPRLVRPEVDVMCTAFHDNEETFLKKYLYEIARRHPYFYAPELLFFAKRYKAAFTECCQAADKAACLLPKLDELRDEGKASSAKQRLKCASLQKFGERAFKAWAVARLSQRFPKAEFAEVSKLVTDLTKVHTECCHGDLLECADDRADLAKYICENQDSISSKLKECCEKPLLEKSHCIAEVENDEMPADLPSLAADFVESKDVCKNYAEAKDVFLGMFLYEYARRHPDYSVVLLLRLAKTYETTLEKCCAAADPHECYAKVFDEFKPLVEEPQNLIKQNCELFEQLGEYKFQNALLVRYTKKVPQVSTPTLVEVSRNLGKVGSKCCKHPEAKRMPCAEDYLSVVLNQLCVLHEKTPVSDRVTKCCTESLVNRRPCFSALEVDETYVPKEFQAETFTFHADICTLSEKERQIKKQTALVELVKHKPKATKEQLKAVMDDFAAFVEKCCKADDKETCFAEEGKKLVAASQAALGLKTHTQVQLVESGGGLVQPGGSLRLSCAASGFTFSDYVMNWVRQAPGKGLEWVAGISWSGVNTHYADSVKGRFTISRDNSKNTLYLQMNSLRAEDTAVYYCARLGATANNIRYKFMDVWGQGTLVTVSSGGGGSGGGGSGGGGSGGGGSDIELTQPPSVSVAPGQTARISCSGDSLRNKVYWYQQKPGQAPVLVIYKNNRPSGIPERFSGSNSGNTATLTISGTQAEDEADYYCQSYDGQKSLVFGGGTKLTVLAAAENLYFQGSHHHHHH

SEQ ID NO: 284 - DNA, 3318 bp, Homo Sapien
gatatcgtgctgacacagagccctgccaccctgtctctgagccctggcgagagagccaccctgagctgccgggccagccagttcatcggctcccgctacctggcctggtatcagcagaagcccggacaggctcccagactgctgatctacggcgccagcaacagagctaccggcgtgcccgccagattttctggcagcggcagcggcaccgacttcaccctgaccatcagcagcctggaacccgaggacttcgccacctactactgccagcagtactacgactacccccagaccttcggccagggcaccaaggtggagatcaagggcggaggcggaagcgggggtggcggaagtggaggcggaggaagcggagggggcggaagccaggtgcaattgaaagagtccggccctgccctggtgaagcctacccagaccctgaccctgacatgcaccttcagcggcttcagcctgagcaacagaggcggcggagtgggctggatcagacagcctcccggcaaggccctggaatggctggcctggatcgactgggacgacgacaagagctacagcaccagcctgaaaacccggctgaccatctccaaggacaccagcaagaaccaggtggtgctcaccatgaccaacatggaccccgtggacaccgccacctattattgcgcccggtttcatctgcccctggtgttcgatagctggggccagggaaccctggtgacagtgtccagcaagacccacaccgacgctcacaagagcgaagtggcacataggttcaaagatctgggcgaagagaactttaaggccctcgtcctgatcgctttcgcacagtacctccagcagtctccctttgaagatcacgtgaaactggtcaatgaggtgaccgaatttgccaagacatgcgtggctgatgagagtgcagaaaactgtgacaaatcactgcatactctctttggagataagctgtgcaccgtcgccacactcagagagacttatggggaaatggctgactgttgcgcaaaacaggagcctgaacggaatgagtgtttcctccagcacaaggatgacaacccaaatctgccccgcctcgtgcgacctgaggtcgatgtgatgtgcaccgcctttcatgacaacgaagagacattcctgaagaaatacctgtatgaaattgctcgtaggcacccatacttttatgcccccgagctcctgttctttgcaaagagatacaaagctgccttcactgaatgttgccaggcagctgataaggccgcatgtctcctgcctaaactggacgagctccgggatgaaggtaaggcttccagcgccaaacagcgcctgaagtgcgcttctctccagaagtttggcgagcgagcattcaaagcctgggctgtggcccgtctcagtcagaggtttccaaaggcagaatttgctgaggtctcaaaactggtgaccgacctcacaaaggtccatactgagtgttgccacggagatctgctggaatgtgccgacgatagagcagacctcgctaaatatatctgcgagaatcaggattccattagctctaagctgaaagaatgttgcgagaagcccctcctggaaaagagtcattgtatcgccgaggtggaaaacgacgagatgccagcagatctgccatcactcgctgccgactttgtggaatccaaagatgtctgcaagaattacgcagaggctaaagacgtgttcctggggatgtttctgtatgagtacgcccggcgtcaccccgattatagcgtcgtgctcctgctccgactggcaaagacctacgaaacaactctggagaaatgttgcgctgccgcagaccctcatgaatgttatgctaaggtgttcgatgagtttaagccactcgtcgaagagccccagaacctgattaaacagaattgcgaactgttcgagcagctcggtgaatacaagtttcagaacgccctgctcgtgcgttataccaaaaaggtccctcaggtgtctacaccaactctggtggaggtcagtaggaatctgggcaaagtgggatcaaagtgttgcaaacaccccgaggcaaagagaatgccttgtgctgaagattacctctccgtcgtgctgaaccagctctgcgtgctgcatgaaaagaccccagtcagcgatcgggtgacaaaatgttgcaccgaatctctggtcaatcgccgaccctgtttcagtgccctcgaagtggacgaaacttatgtgcctaaggagtttcaggctgaaacattcacctttcacgccgatatctgcactctgtccgagaaagaaaggcagattaagaaacagacagcactggtcgagctcgtgaagcataaaccaaaggctaccaaggagcagctgaaagccgtcatggacgatttcgcagcttttgtggaaaagtgttgcaaagccgacgataaggagacttgtttcgcagaagaggggaaaaagctcgtggctgccagccaggcagctctgggtctgaagacccacacccaggttcaattggttgaaagcggtggtggtctggttcagcctggtggtagcctgcgtctgagctgtgcagcaagcggttttacctttagcgattatgtgatgaattgggttcgtcaggcaccgggtaaaggtctggaatgggttgccggtattagctggtcaggtgttaatacccattatgcagatagcgtgaaaggtcgttttaccattagccgtgataatagcaaaaataccctgtatctgcagatgaatagcctgcgtgcagaagataccgcagtttattattgtgcacgtctgggtgcaaccgcaaataatattcgctataaatttatggatgtgtggggtcagggtacactagttaccgttagcagtggtggtggcggcagcggcggtggcggttccggcggtggtggcagcggtggtggtggtagcgatatcgaactgacccagcctccgagcgttagcgttgcaccgggtcagaccgcacgtattagctgtagcggtgatagtctgcgtaataaagtttattggtatcagcagaaaccgggtcaggctccggttctggttatttataaaaataatcgtccgagcggtattccggaacgttttagcggtagcaatagcggtaataccgcaaccctgaccattagcggcacccaggcagaagatgaagccgattattattgtcagagctatgatggtcagaaaagcctggtttttggtggtggcaccaagcttaccgttctggcggccgcagagaacctgtattttcagggtagccaccatcatcaccatcac

SEQ ID NO: 285 - protein, 528 aa, Homo Sapien
DIVLTQSPATLSLSPGERATLSCRASQFIGSRYLAWYQQKPGQAPRLLIYGASNRATGVPARFSGSGSGTDFTLTISSLEPEDFATYYCQQYYDYPQTFGQGTKVEIKGGGGSGGGGSGGGGSGGGGSQVQLKESGPALVKPTQTLTLTCTFSGFSLSNRGGGVGWIRQPPGKALEWLAWIDWDDDKSYSTSLKTRLTISKDTSKNQVVLTMTNMDPVDTATYYCARFHLPLVFDSWGQGTLVTVSSGGGGSGGGGSGGGGSQVQLVESGGGLVQPGGSLRLSCAASGFTFSDYVMNWVRQAPGKGLEWVAGISWSGVNTHYADSVKGRFTISRDNSKNTLYLQMNSLRAEDTAVYYCARLGATANNIRYKFMDVWGQGTLVTVSSGGGGSGGGGSGGGGSGGGGSDIELTQPPSVSVAPGQTARISCSGDSLRNKVYWYQQKPGQAPVLVIYKNNRPSGIPERFSGSNSGNTATLTISGTQAEDEADYYCQSYDGQKSLVFGGGTKLTVLAAAENLYFQGSHHHHHH

SEQ ID NO: 286 - DNA, 1584 bp, Homo Sapien
gatatcgtgctgacacagagccctgccaccctgtctctgagccctggcgagagagccaccctgagctgccgggccagccagttcatcggctcccgctacctggcctggtatcagcagaagcccggacaggctcccagactgctgatctacggcgccagcaacagagctaccggcgtgcccgccagattttctggcagcggcagcggcaccgacttcaccctgaccatcagcagcctggaacccgaggacttcgccacctactactgccagcagtactacgactacccccagaccttcggccagggcaccaaggtggagatcaagggcggaggcggaagcgggggtggcggaagtggaggcggaggaagcggagggggcggaagccaggtgcaattgaaagagtccggccctgccctggtgaagcctacccagaccctgaccctgacatgcaccttcagcggcttcagcctgagcaacagaggcggcggagtgggctggatcagacagcctcccggcaaggccctggaatggctggcctggatcgactgggacgacgacaagagctacagcaccagcctgaaaacccggctgaccatctccaaggacaccagcaagaaccaggtggtgctcaccatgaccaacatggaccccgtggacaccgccacctattattgcgcccggtttcatctgcccctggtgttcgatagctggggccagggaaccctggtgacagtgtccagcggaggtggcgggagtggtggagggggctcaggcgggggtggatctcaggttcaattggttgaaagcggtggtggtctggttcagcctggtggtagcctgcgtctgagctgtgcagcaagcggttttacctttagcgattatgtgatgaattgggttcgtcaggcaccgggtaaaggtctggaatgggttgccggtattagctggtcaggtgttaatacccattatgcagatagcgtgaaaggtcgttttaccattagccgtgataatagcaaaaataccctgtatctgcagatgaatagcctgcgtgcagaagataccgcagtttattattgtgcacgtctgggtgcaaccgcaaataatattcgctataaatttatggatgtgtggggtcagggtacactagttaccgttagcagtggtggtggcggcagcggcggtggcggttccggcggtggtggcagcggtggtggtggtagcgatatcgaactgacccagcctccgagcgttagcgttgcaccgggtcagaccgcacgtattagctgtagcggtgatagtctgcgtaataaagtttattggtatcagcagaaaccgggtcaggctccggttctggttatttataaaaataatcgtccgagcggtattccggaacgttttagcggtagcaatagcggtaataccgcaaccctgaccattagcggcacccaggcagaagatgaagccgattattattgtcagagctatgatggtcagaaaagcctggtttttggtggtggcaccaagcttaccgttctggcggccgcagagaacctgtattttcagggtagccaccatcatcaccatcac

SEQ ID NO: 287 - protein, 1110 aa, Homo Sapien
DIVLTQSPATLSLSPGERATLSCRASQFIGSRYLAWYQQKPGQAPRLLIYGASNRATGVPARFSGSGSGTDFTLTISSLEPEDFATYYCQQYYDYPQTFGQGTKVEIKGGGGSGGGGSGGGGSGGGGSQVQLKESGPALVKPTQTLTLTCTFSGFSLSNRGGGVGWIRQPPGKALEWLAWIDWDDDKSYSTSLKTRLTISKDTSKNQVVLTMTNMDPVDTATYYCARFHLPLVFDSWGQGTLVTVSSGGGGSGGGGSGGGGSQVQLVESGGGLVQPGGSLRLSCAASGFTFSDYVMNWVRQAPGKGLEWVAGISWSGVNTHYADSVKGRFTISRDNSKNTLYLQMNSLRAEDTAVYYCARLGATANNIRYKFMDVWGQGTLVTVSSGGGGSGGGGSGGGGSGGGGSDIELTQPPSVSVAPGQTARISCSGDSLRNKVYWYQQKPGQAPVLVIYKNNRPSGIPERFSGSNSGNTATLTISGTQAEDEADYYCQSYDGQKSLVFGGGTKLTVLDKTHTDAHKSEVAHRFKDLGEENFKALVLIAFAQYLQQSPFEDHVKLVNEVTEFAKTCVADESAENCDKSLHTLFGDKLCTVATLRETYGEMADCCAKQEPERNECFLQHKDDNPNLPRLVRPEVDVMCTAFHDNEETFLKKYLYEIARRHPYFYAPELLFFAKRYKAAFTECCQAADKAACLLPKLDELRDEGKASSAKQRLKCASLQKFGERAFKAWAVARLSQRFPKAEFAEVSKLVTDLTKVHTECCHGDLLECADDRADLAKYICENQDSISSKLKECCEKPLLEKSHCIAEVENDEMPADLPSLAADFVESKDVCKNYAEAKDVFLGMFLYEYARRHPDYSVVLLLRLAKTYETTLEKCCAAADPHECYAKVFDEFKPLVEEPQNLIKQNCELFEQLGEYKFQNALLVRYTKKVPQVSTPTLVEVSRNLGKVGSKCCKHPEAKRMPCAEDYLSVVLNQLCVLHEKTPVSDRVTKCCTESLVNRRPCFSALEVDETYVPKEFQAETFTFHADICTLSEKERQIKKQTALVELVKHKPKATKEQLKAVMDDFAAFVEKCCKADDKETCFAEEGKKLVAASQAALGLAAAHHHHHH

SEQ ID NO: 288 - DNA, 3330 bp, Homo Sapien
gatatcgtgctgacacagagccctgccaccctgtctctgagccctggcgagagagccaccctgagctgccgggccagccagttcatcggctcccgctacctggcctggtatcagcagaagcccggacaggctcccagactgctgatctacggcgccagcaacagagctaccggcgtgcccgccagattttctggcagcggcagcggcaccgacttcaccctgaccatcagcagcctggaacccgaggacttcgccacctactactgccagcagtactacgactacccccagaccttcggccagggcaccaaggtggagatcaagggcggaggcggaagcgggggtggcggaagtggaggcggaggaagcggagggggcggaagccaggtgcaattgaaagagtccggccctgccctggtgaagcctacccagaccctgaccctgacatgcaccttcagcggcttcagcctgagcaacagaggcggcggagtgggctggatcagacagcctcccggcaaggccctggaatggctggcctggatcgactgggacgacgacaagagctacagcaccagcctgaaaacccggctgaccatctccaaggacaccagcaagaaccaggtggtgctcaccatgaccaacatggaccccgtggacaccgccacctattattgcgcccggtttcatctgcccctggtgttcgatagctggggccagggaaccctggtgacagtgtccagcggaggtggcgggagtggtggagggggctcaggcgggggtggatctcaggttcaattggttgaaagcggtggtggtctggttcagcctggtggtagcctgcgtctgagctgtgcagcaagcggttttacctttagcgattatgtgatgaattgggttcgtcaggcaccgggtaaaggtctggaatgggttgccggtattagctggtcaggtgttaatacccattatgcagatagcgtgaaaggtcgttttaccattagccgtgataatagcaaaaataccctgtatctgcagatgaatagcctgcgtgcagaagataccgcagtttattattgtgcacgtctgggtgcaaccgcaaataatattcgctataaatttatggatgtgtggggtcagggtacactagttaccgttagcagtggtggtggcggcagcggcggtggcggttccggcggtggtggcagcggtggtggtggtagcgatatcgaactgacccagcctccgagcgttagcgttgcaccgggtcagaccgcacgtattagctgtagcggtgatagtctgcgtaataaagtttattggtatcagcagaaaccgggtcaggctccggttctggttatttataaaaataatcgtccgagcggtattccggaacgttttagcggtagcaatagcggtaataccgcaaccctgaccattagcggcacccaggcagaagatgaagccgattattattgtcagagctatgatggtcagaaaagcctggtttttggtggtggcaccaagcttaccgttctggacaagacccacaccgacgctcacaagagcgaagtggcacataggttcaaagatctgggcgaagagaactttaaggccctcgtcctgatcgctttcgcacagtacctccagcagtctccctttgaagatcacgtgaaactggtcaatgaggtgaccgaatttgccaagacatgcgtggctgatgagagtgcagaaaactgtgacaaatcactgcatactctctttggagataagctgtgcaccgtcgccacactcagagagacttatggggaaatggctgactgttgcgcaaaacaggagcctgaacggaatgagtgtttcctccagcacaaggatgacaacccaaatctgccccgcctcgtgcgacctgaggtcgatgtgatgtgcaccgcctttcatgacaacgaagagacattcctgaagaaatacctgtatgaaattgctcgtaggcacccatacttttatgcccccgagctcctgttctttgcaaagagatacaaagctgccttcactgaatgttgccaggcagctgataaggccgcatgtctcctgcctaaactggacgagctccgggatgaaggtaaggcttccagcgccaaacagcgcctgaagtgcgcttctctccagaagtttggcgagcgagcattcaaagcctgggctgtggcccgtctcagtcagaggtttccaaaggcagaatttgctgaggtctcaaaactggtgaccgacctcacaaaggtccatactgagtgttgccacggagatctgctggaatgtgccgacgatagagcagacctcgctaaatatatctgcgagaatcaggattccattagctctaagctgaaagaatgttgcgagaagcccctcctggaaaagagtcattgtatcgccgaggtggaaaacgacgagatgccagcagatctgccatcactcgctgccgactttgtggaatccaaagatgtctgcaagaattacgcagaggctaaagacgtgttcctggggatgtttctgtatgagtacgcccggcgtcaccccgattatagcgtcgtgctcctgctccgactggcaaagacctacgaaacaactctggagaaatgttgcgctgccgcagaccctcatgaatgttatgctaaggtgttcgatgagtttaagccactcgtcgaagagccccagaacctgattaaacagaattgcgaactgttcgagcagctcggtgaatacaagtttcagaacgccctgctcgtgcgttataccaaaaaggtccctcaggtgtctacaccaactctggtggaggtcagtaggaatctgggcaaagtgggatcaaagtgttgcaaacaccccgaggcaaagagaatgccttgtgctgaagattacctctccgtcgtgctgaaccagctctgcgtgctgcatgaaaagaccccagtcagcgatcgggtgacaaaatgttgcaccgaatctctggtcaatcgccgaccctgtttcagtgccctcgaagtggacgaaacttatgtgcctaaggagtttcaggctgaaacattcacctttcacgccgatatctgcactctgtccgagaaagaaaggcagattaagaaacagacagcactggtcgagctcgtgaagcataaaccaaaggctaccaaggagcagctgaaagccgtcatggacgatttcgcagcttttgtggaaaagtgttgcaaagccgacgataaggagacttgtttcgcagaagaggggaaaaagctcgtggctgccagccaggcagctctgggtctggcagctgcccatcaccaccatcatcat

SEQ ID NO: 289 - protein, 854 aa, Homo Sapien
QVQLVESGGGLVQPGGSLRLSCAASGFTFSDYVMNWVRQAPGKGLEWVAGISWSGVNTHYADSVKGRFTISRDNSKNTLYLQMNSLRAEDTAVYYCARLGATANNIRYKFMDVWGQGTLVTVSSGGGGSGGGGSGGGGSGGGGSDIELTQPPSVSVAPGQTARISCSGDSLRNKVYWYQQKPGQAPVLVIYKNNRPSGIPERFSGSNSGNTATLTISGTQAEDEADYYCQSYDGQKSLVFGGGTKLTVLAASDAHKSEVAHRFKDLGEENFKALVLIAFAQYLQQSPFEDHVKLVNEVTEFAKTCVADESAENCDKSLHTLFGDKLCTVATLRETYGEMADCCAKQEPERNECFLQHKDDNPNLPRLVRPEVDVMCTAFHDNEETFLKKYLYEIARRHPYFYAPELLFFAKRYKAAFTECCQAADKAACLLPKLDELRDEGKASSAKQRLKCASLQKFGERAFKAWAVARLSQRFPKAEFAEVSKLVTDLTKVHTECCHGDLLECADDRADLAKYICENQDSISSKLKECCEKPLLEKSHCIAEVENDEMPADLPSLAADFVESKDVCKNYAEAKDVFLGMFLYEYARRHPDYSVVLLLRLAKTYETTLEKCCAAADPHECYAKVFDEFKPLVEEPQNLIKQNCELFEQLGEYKFQNALLVRYTKKVPQVSTPTLVEVSRNLGKVGSKCCKHPEAKRMPCAEDYLSVVLNQLCVLHEKTPVSDRVTKCCTESLVNRRPCFSALEVDETYVPKEFQAETFTFHADICTLSEKERQIKKQTALVELVKHKPKATKEQLKAVMDDFAAFVEKCCKADDKETCFAEEGKKLVAASQAALGLAAAENLYFQGSHHHHHH

SEQ ID NO: 290 - DNA, 2562 bp, Homo Sapien
caggttcaattggttgaaagcggtggtggtctggttcagcctggtggtagcctgcgtctgagctgtgcagcaagcggttttacctttagcgattatgtgatgaattgggttcgtcaggcaccgggtaaaggtctggaatgggttgccggtattagctggtcaggtgttaatacccattatgcagatagcgtgaaaggtcgttttaccattagccgtgataatagcaaaaataccctgtatctgcagatgaatagcctgcgtgcagaagataccgcagtttattattgtgcacgtctgggtgcaaccgcaaataatattcgctataaatttatggatgtgtggggtcagggtacactagttaccgttagcagtggtggtggcggcagcggcggtggcggttccggcggtggtggcagcggtggtggtggtagcgatatcgaactgacccagcctccgagcgttagcgttgcaccgggtcagaccgcacgtattagctgtagcggtgatagtctgcgtaataaagtttattggtatcagcagaaaccgggtcaggctccggttctggttatttataaaaataatcgtccgagcggtattccggaacgttttagcggtagcaatagcggtaataccgcaaccctgaccattagcggcacccaggcagaagatgaagccgattattattgtcagagctatgatggtcagaaaagcctggtttttggtggtggcaccaagcttaccgttctggcggcgagcgacgctcacaagagcgaagtggcacataggttcaaagatctgggcgaagagaactttaaggccctcgtcctgatcgctttcgcacagtacctccagcagtctccctttgaagatcacgtgaaactggtcaatgaggtgaccgaatttgccaagacatgcgtggctgatgagagtgcagaaaactgtgacaaatcactgcatactctctttggagataagctgtgcaccgtcgccacactcagagagacttatggggaaatggctgactgttgcgcaaaacaggagcctgaacggaatgagtgtttcctccagcacaaggatgacaacccaaatctgccccgcctcgtgcgacctgaggtcgatgtgatgtgcaccgcctttcatgacaacgaagagacattcctgaagaaatacctgtatgaaattgctcgtaggcacccatacttttatgcccccgagctcctgttctttgcaaagagatacaaagctgccttcactgaatgttgccaggcagctgataaggccgcatgtctcctgcctaaactggacgagctccgggatgaaggtaaggcttccagcgccaaacagcgcctgaagtgcgcttctctccagaagtttggcgagcgagcattcaaagcctgggctgtggcccgtctcagtcagaggtttccaaaggcagaatttgctgaggtctcaaaactggtgaccgacctcacaaaggtccatactgagtgttgccacggagatctgctggaatgtgccgacgatagagcagacctcgctaaatatatctgcgagaatcaggattccattagctctaagctgaaagaatgttgcgagaagcccctcctggaaaagagtcattgtatcgccgaggtggaaaacgacgagatgccagcagatctgccatcactcgctgccgactttgtggaatccaaagatgtctgcaagaattacgcagaggctaaagacgtgttcctggggatgtttctgtatgagtacgcccggcgtcaccccgattatagcgtcgtgctcctgctccgactggcaaagacctacgaaacaactctggagaaatgttgcgctgccgcagaccctcatgaatgttatgctaaggtgttcgatgagtttaagccactcgtcgaagagccccagaacctgattaaacagaattgcgaactgttcgagcagctcggtgaatacaagtttcagaacgccctgctcgtgcgttataccaaaaaggtccctcaggtgtctacaccaactctggtggaggtcagtaggaatctgggcaaagtgggatcaaagtgttgcaaacaccccgaggcaaagagaatgccttgtgctgaagattacctctccgtcgtgctgaaccagctctgcgtgctgcatgaaaagaccccagtcagcgatcgggtgacaaaatgttgcaccgaatctctggtcaatcgccgaccctgtttcagtgccctcgaagtggacgaaacttatgtgcctaaggagtttcaggctgaaacattcacctttcacgccgatatctgcactctgtccgagaaagaaaggcagattaagaaacagacagcactggtcgagctcgtgaagcataaaccaaaggctaccaaggagcagctgaaagccgtcatggacgatttcgcagcttttgtggaaaagtgttgcaaagccgacgataaggagacttgtttcgcagaagaggggaaaaagctcgtggctgccagccaggcagctctgggtctggcggccgcagagaacctgtattttcagggtagccaccatcatcaccatcac

SEQ ID NO: 291 - protein, 852 aa, Homo Sapien
DIVLTQSPATLSLSPGERATLSCRASQFIGSRYLAWYQQKPGQAPRLLIYGASNRATGVPARFSGSGSGTDFTLTISSLEPEDFATYYCQQYYDYPQTFGQGTKVEIKGGGGSGGGGSGGGGSGGGGSQVQLKESGPALVKPTQTLTLTCTFSGFSLSNRGGGVGWIRQPPGKALEWLAWIDWDDDKSYSTSLKTRLTISKDTSKNQVVLTMTNMDPVDTATYYCARFHLPLVFDSWGQGTLVTVSSAASDAHKSEVAHRFKDLGEENFKALVLIAFAQYLQQSPFEDHVKLVNEVTEFAKTCVADESAENCDKSLHTLFGDKLCTVATLRETYGEMADCCAKQEPERNECFLQHKDDNPNLPRLVRPEVDVMCTAFHDNEETFLKKYLYEIARRHPYFYAPELLFFAKRYKAAFTECCQAADKAACLLPKLDELRDEGKASSAKQRLKCASLQKFGERAFKAWAVARLSQRFPKAEFAEVSKLVTDLTKVHTECCHGDLLECADDRADLAKYICENQDSISSKLKECCEKPLLEKSHCIAEVENDEMPADLPSLAADFVESKDVCKNYAEAKDVFLGMFLYEYARRHPDYSVVLLLRLAKTYETTLEKCCAAADPHECYAKVFDEFKPLVEEPQNLIKQNCELFEQLGEYKFQNALLVRYTKKVPQVSTPTLVEVSRNLGKVGSKCCKHPEAKRMPCAEDYLSVVLNQLCVLHEKTPVSDRVTKCCTESLVNRRPCFSALEVDETYVPKEFQAETFTFHADICTLSEKERQIKKQTALVELVKHKPKATKEQLKAVMDDFAAFVEKCCKADDKETCFAEEGKKLVAASQAALGLAAAENLYFQGSHHHHHH

SEQ ID NO: 292 - DNA, 2556 bp, Homo Sapien
gatatcgtgctgacacagagccctgccaccctgtctctgagccctggcgagagagccaccctgagctgccgggccagccagttcatcggctcccgctacctggcctggtatcagcagaagcccggacaggctcccagactgctgatctacggcgccagcaacagagctaccggcgtgcccgccagattttctggcagcggcagcggcaccgacttcaccctgaccatcagcagcctggaacccgaggacttcgccacctactactgccagcagtactacgactacccccagaccttcggccagggcaccaaggtggagatcaagggcggaggcggaagcgggggtggcggaagtggaggcggaggaagcggagggggcggaagccaggtgcaattgaaagagtccggccctgccctggtgaagcctacccagaccctgaccctgacatgcaccttcagcggcttcagcctgagcaacagaggcggcggagtgggctggatcagacagcctcccggcaaggccctggaatggctggcctggatcgactgggacgacgacaagagctacagcaccagcctgaaaacccggctgaccatctccaaggacaccagcaagaaccaggtggtgctcaccatgaccaacatggaccccgtggacaccgccacctattattgcgcccggtttcatctgcccctggtgttcgatagctggggccagggaaccctggtgacagtgtccagcgcggcgagcgacgctcacaagagcgaagtggcacataggttcaaagatctgggcgaagagaactttaaggccctcgtcctgatcgctttcgcacagtacctccagcagtctccctttgaagatcacgtgaaactggtcaatgaggtgaccgaatttgccaagacatgcgtggctgatgagagtgcagaaaactgtgacaaatcactgcatactctctttggagataagctgtgcaccgtcgccacactcagagagacttatggggaaatggctgactgttgcgcaaaacaggagcctgaacggaatgagtgtttcctccagcacaaggatgacaacccaaatctgccccgcctcgtgcgacctgaggtcgatgtgatgtgcaccgcctttcatgacaacgaagagacattcctgaagaaatacctgtatgaaattgctcgtaggcacccatacttttatgcccccgagctcctgttctttgcaaagagatacaaagctgccttcactgaatgttgccaggcagctgataaggccgcatgtctcctgcctaaactggacgagctccgggatgaaggtaaggcttccagcgccaaacagcgcctgaagtgcgcttctctccagaagtttggcgagcgagcattcaaagcctgggctgtggcccgtctcagtcagaggtttccaaaggcagaatttgctgaggtctcaaaactggtgaccgacctcacaaaggtccatactgagtgttgccacggagatctgctggaatgtgccgacgatagagcagacctcgctaaatatatctgcgagaatcaggattccattagctctaagctgaaagaatgttgcgagaagcccctcctggaaaagagtcattgtatcgccgaggtggaaaacgacgagatgccagcagatctgccatcactcgctgccgactttgtggaatccaaagatgtctgcaagaattacgcagaggctaaagacgtgttcctggggatgtttctgtatgagtacgcccggcgtcaccccgattatagcgtcgtgctcctgctccgactggcaaagacctacgaaacaactctggagaaatgttgcgctgccgcagaccctcatgaatgttatgctaaggtgttcgatgagtttaagccactcgtcgaagagccccagaacctgattaaacagaattgcgaactgttcgagcagctcggtgaatacaagtttcagaacgccctgctcgtgcgttataccaaaaaggtccctcaggtgtctacaccaactctggtggaggtcagtaggaatctgggcaaagtgggatcaaagtgttgcaaacaccccgaggcaaagagaatgccttgtgctgaagattacctctccgtcgtgctgaaccagctctgcgtgctgcatgaaaagaccccagtcagcgatcgggtgacaaaatgttgcaccgaatctctggtcaatcgccgaccctgtttcagtgccctcgaagtggacgaaacttatgtgcctaaggagtttcaggctgaaacattcacctttcacgccgatatctgcactctgtccgagaaagaaaggcagattaagaaacagacagcactggtcgagctcgtgaagcataaaccaaaggctaccaaggagcagctgaaagccgtcatggacgatttcgcagcttttgtggaaaagtgttgcaaagccgacgataaggagacttgtttcgcagaagaggggaaaaagctcgtggctgccagccaggcagctctgggtctggcggccgcagagaacctgtattttcagggtagccaccatcatcaccatcac

SEQ ID NO: 293 - protein, 1084 aa, Homo Sapien
QVQLVESGGGLVQPGGSLRLSCAASGFTFSDYVMNWVRQAPGKGLEWVAGISWSGVNTHYADSVKGRFTISRDNSKNTLYLQMNSLRAEDTAVYYCARLGATANNIRYKFMDVWGQGTLVTVSSGGGGSGGGGSGGGGSGGGGSSYELTQPPSVSVAPGQTARISCSGDSLRNKVYWYQQKPGQAPVLVIYKNNRPSGIPERFSGSNSGNTATLTISGTQAEDEADYYCQSYDGQKSLVFGGGTKLTVLDAHKSEVAHRFKDLGEENFKALVLIAFAQYLQQSPFEDHVKLVNEVTEFAKTCVADESAENCDKSLHTLFGDKLCTVATLRETYGEMADCCAKQEPERNECFLQHKDDNPNLPRLVRPEVDVMCTAFHDNEETFLKKYLYEIARRHPYFYAPELLFFAKRYKAAFTECCQAADKAACLLPKLDELRDEGKASSAKQRLKCASLQKFGERAFKAWAVARLSQRFPKAEFAEVSKLVTDLTKVHTECCHGDLLECADDRADLAKYICENQDSISSKLKECCEKPLLEKSHCIAEVENDEMPADLPSLAADFVESKDVCKNYAEAKDVFLGMFLYEYARRHPDYSVVLLLRLAKTYETTLEKCCAAADPHECYAKVFDEFKPLVEEPQNLIKQNCELFEQLGEYKFQNALLVRYTKKVPQVSTPTLVEVSRNLGKVGSKCCKHPEAKRMPCAEDYLSVVLNQLCVLHEKTPVSDRVTKCCTESLVNRRPCFSALEVDETYVPKEFQAETFTFHADICTLSEKERQIKKQTALVELVKHKPKATKEQLKAVMDDFAAFVEKCCKADDKETCFAEEGKKLVAASQAALGLDIVLTQSPATLSLSPGERATLSCRASQFIGSRYLAWYQQKPGQAPRLLIYGASNRATGVPARFSGSGSGTDFTLTISSLEPEDFATYYCQQYYDYPQTFGQGTKVEIKGGGGSGGGGSGGGGSGGGGSQVQLKESGPALVKPTQTLTLTCTFSGFSLSNRGGGVGWIRQPPGKALEWLAWIDWDDDKSYSTSLKTRLTISKDTSKNQVVLTMTNMDPVDTATYYCARFHLPLVFDSWGQGTLVTVSSAAA

SEQ ID NO: 294 - DNA, 3252 bp, Homo Sapien
caggttcaattggttgaaagcggtggtggtctggttcagcctggtggtagcctgcgtctgagctgtgcagcaagcggttttacctttagcgattatgtgatgaattgggttcgtcaggcaccgggtaaaggtctggaatgggttgccggtattagctggtcaggtgttaatacccattatgcagatagcgtgaaaggtcgttttaccattagccgtgataatagcaaaaataccctgtatctgcagatgaatagcctgcgtgcagaagataccgcagtttattattgtgcacgtctgggtgcaaccgcaaataatattcgctataaatttatggatgtgtggggtcagggtacactagttaccgttagcagtggtggtggcggcagcggcggtggcggttccggcggtggtggcagcggtggtggtggtagctcttacgaactgacccagcctccgagcgttagcgttgcaccgggtcagaccgcacgtattagctgtagcggtgatagtctgcgtaataaagtttattggtatcagcagaaaccgggtcaggctccggttctggttatttataaaaataatcgtccgagcggtattccggaacgttttagcggtagcaatagcggtaataccgcaaccctgaccattagcggcacccaggcagaagatgaagccgattattattgtcagagctatgatggtcagaaaagcctggtttttggtggtggcaccaagcttaccgttctggacgctcacaagagcgaagtggcacataggttcaaagatctgggcgaagagaactttaaggccctcgtcctgatcgctttcgcacagtacctccagcagtctccctttgaagatcacgtgaaactggtcaatgaggtgaccgaatttgccaagacatgcgtggctgatgagagtgcagaaaactgtgacaaatcactgcatactctctttggagataagctgtgcaccgtcgccacactcagagagacttatggggaaatggctgactgttgcgcaaaacaggagcctgaacggaatgagtgtttcctccagcacaaggatgacaacccaaatctgccccgcctcgtgcgacctgaggtcgatgtgatgtgcaccgcctttcatgacaacgaagagacattcctgaagaaatacctgtatgaaattgctcgtaggcacccatacttttatgcccccgagctcctgttctttgcaaagagatacaaagctgccttcactgaatgttgccaggcagctgataaggccgcatgtctcctgcctaaactggacgagctccgggatgaaggtaaggcttccagcgccaaacagcgcctgaagtgcgcttctctccagaagtttggcgagcgagcattcaaagcctgggctgtggcccgtctcagtcagaggtttccaaaggcagaatttgctgaggtctcaaaactggtgaccgacctcacaaaggtccatactgagtgttgccacggagatctgctggaatgtgccgacgatagagcagacctcgctaaatatatctgcgagaatcaggattccattagctctaagctgaaagaatgttgcgagaagcccctcctggaaaagagtcattgtatcgccgaggtggaaaacgacgagatgccagcagatctgccatcactcgctgccgactttgtggaatccaaagatgtctgcaagaattacgcagaggctaaagacgtgttcctggggatgtttctgtatgagtacgcccggcgtcaccccgattatagcgtcgtgctcctgctccgactggcaaagacctacgaaacaactctggagaaatgttgcgctgccgcagaccctcatgaatgttatgctaaggtgttcgatgagtttaagccactcgtcgaagagccccagaacctgattaaacagaattgcgaactgttcgagcagctcggtgaatacaagtttcagaacgccctgctcgtgcgttataccaaaaaggtccctcaggtgtctacaccaactctggtggaggtcagtaggaatctgggcaaagtgggatcaaagtgttgcaaacaccccgaggcaaagagaatgccttgtgctgaagattacctctccgtcgtgctgaaccagctctgcgtgctgcatgaaaagaccccagtcagcgatcgggtgacaaaatgttgcaccgaatctctggtcaatcgccgaccctgtttcagtgccctcgaagtggacgaaacttatgtgcctaaggagtttcaggctgaaacattcacctttcacgccgatatctgcactctgtccgagaaagaaaggcagattaagaaacagacagcactggtcgagctcgtgaagcataaaccaaaggctaccaaggagcagctgaaagccgtcatggacgatttcgcagcttttgtggaaaagtgttgcaaagccgacgataaggagacttgtttcgcagaagaggggaaaaagctcgtggctgccagccaggcagctctgggtctggatatcgtgctgacacagagccctgccaccctgtctctgagccctggcgagagagccaccctgagctgccgggccagccagttcatcggctcccgctacctggcctggtatcagcagaagcccggacaggctcccagactgctgatctacggcgccagcaacagagctaccggcgtgcccgccagattttctggcagcggcagcggcaccgacttcaccctgaccatcagcagcctggaacccgaggacttcgccacctactactgccagcagtactacgactacccccagaccttcggccagggcaccaaggtggagatcaagggcggaggcggaagcgggggtggcggaagtggaggcggaggaagcggagggggcggaagccaggtgcaattgaaagagtccggccctgccctggtgaagcctacccagaccctgaccctgacatgcaccttcagcggcttcagcctgagcaacagaggcggcggagtgggctggatcagacagcctcccggcaaggccctggaatggctggcctggatcgactgggacgacgacaagagctacagcaccagcctgaaaacccggctgaccatctccaaggacaccagcaagaaccaggtggtgctcaccatgaccaacatggaccccgtggacaccgccacctattattgcgcccggtttcatctgcccctggtgttcgatagctggggccagggaaccctggtgacagtgtccagcgcggccgca

SEQ ID NO: 295 - protein, 1084 aa, Homo Sapien
DIVLTQSPATLSLSPGERATLSCRASQFIGSRYLAWYQQKPGQAPRLLIYGASNRATGVPARFSGSGSGTDFTLTISSLEPEDFATYYCQQYYDYPQTFGQGTKVEIKGGGGSGGGGSGGGGSGGGGSQVQLKESGPALVKPTQTLTLTCTFSGFSLSNRGGGVGWIRQPPGKALEWLAWIDWDDDKSYSTSLKTRLTISKDTSKNQVVLTMTNMDPVDTATYYCARFHLPLVFDSWGQGTLVTVSSDAHKSEVAHRFKDLGEENFKALVLIAFAQYLQQSPFEDHVKLVNEVTEFAKTCVADESAENCDKSLHTLFGDKLCTVATLRETYGEMADCCAKQEPERNECFLQHKDDNPNLPRLVRPEVDVMCTAFHDNEETFLKKYLYEIARRHPYFYAPELLFFAKRYKAAFTECCQAADKAACLLPKLDELRDEGKASSAKQRLKCASLQKFGERAFKAWAVARLSQRFPKAEFAEVSKLVTDLTKVHTECCHGDLLECADDRADLAKYICENQDSISSKLKECCEKPLLEKSHCIAEVENDEMPADLPSLAADFVESKDVCKNYAEAKDVFLGMFLYEYARRHPDYSVVLLLRLAKTYETTLEKCCAAADPHECYAKVFDEFKPLVEEPQNLIKQNCELFEQLGEYKFQNALLVRYTKKVPQVSTPTLVEVSRNLGKVGSKCCKHPEAKRMPCAEDYLSVVLNQLCVLHEKTPVSDRVTKCCTESLVNRRPCFSALEVDETYVPKEFQAETFTFHADICTLSEKERQIKKQTALVELVKHKPKATKEQLKAVMDDFAAFVEKCCKADDKETCFAEEGKKLVAASQAALGLQVQLVESGGGLVQPGGSLRLSCAASGFTFSDYVMNWVRQAPGKGLEWVAGISWSGVNTHYADSVKGRFTISRDNSKNTLYLQMNSLRAEDTAVYYCARLGATANNIRYKFMDVWGQGTLVTVSSGGGGSGGGGSGGGGSGGGGSSYELTQPPSVSVAPGQTARISCSGDSLRNKVYWYQQKPGQAPVLVIYKNNRPSGIPERFSGSNSGNTATLTISGTQAEDEADYYCQSYDGQKSLVFGGGTKLTVLAAA

SEQ ID NO: 296 - DNA, 3252 bp, Homo Sapien
gatatcgtgctgacacagagccctgccaccctgtctctgagccctggcgagagagccaccctgagctgccgggccagccagttcatcggctcccgctacctggcctggtatcagcagaagcccggacaggctcccagactgctgatctacggcgccagcaacagagctaccggcgtgcccgccagattttctggcagcggcagcggcaccgacttcaccctgaccatcagcagcctggaacccgaggacttcgccacctactactgccagcagtactacgactacccccagaccttcggccagggcaccaaggtggagatcaagggcggaggcggaagcgggggtggcggaagtggaggcggaggaagcggagggggcggaagccaggtgcaattgaaagagtccggccctgccctggtgaagcctacccagaccctgaccctgacatgcaccttcagcggcttcagcctgagcaacagaggcggcggagtgggctggatcagacagcctcccggcaaggccctggaatggctggcctggatcgactgggacgacgacaagagctacagcaccagcctgaaaacccggctgaccatctccaaggacaccagcaagaaccaggtggtgctcaccatgaccaacatggaccccgtggacaccgccacctattattgcgcccggtttcatctgcccctggtgttcgatagctggggccagggaaccctggtgacagtgtccagcgacgctcacaagagcgaagtggcacataggttcaaagatctgggcgaagagaactttaaggccctcgtcctgatcgctttcgcacagtacctccagcagtctccctttgaagatcacgtgaaactggtcaatgaggtgaccgaatttgccaagacatgcgtggctgatgagagtgcagaaaactgtgacaaatcactgcatactctctttggagataagctgtgcaccgtcgccacactcagagagacttatggggaaatggctgactgttgcgcaaaacaggagcctgaacggaatgagtgtttcctccagcacaaggatgacaacccaaatctgccccgcctcgtgcgacctgaggtcgatgtgatgtgcaccgcctttcatgacaacgaagagacattcctgaagaaatacctgtatgaaattgctcgtaggcacccatacttttatgcccccgagctcctgttctttgcaaagagatacaaagctgccttcactgaatgttgccaggcagctgataaggccgcatgtctcctgcctaaactggacgagctccgggatgaaggtaaggcttccagcgccaaacagcgcctgaagtgcgcttctctccagaagtttggcgagcgagcattcaaagcctgggctgtggcccgtctcagtcagaggtttccaaaggcagaatttgctgaggtctcaaaactggtgaccgacctcacaaaggtccatactgagtgttgccacggagatctgctggaatgtgccgacgatagagcagacctcgctaaatatatctgcgagaatcaggattccattagctctaagctgaaagaatgttgcgagaagcccctcctggaaaagagtcattgtatcgccgaggtggaaaacgacgagatgccagcagatctgccatcactcgctgccgactttgtggaatccaaagatgtctgcaagaattacgcagaggctaaagacgtgttcctggggatgtttctgtatgagtacgcccggcgtcaccccgattatagcgtcgtgctcctgctccgactggcaaagacctacgaaacaactctggagaaatgttgcgctgccgcagaccctcatgaatgttatgctaaggtgttcgatgagtttaagccactcgtcgaagagccccagaacctgattaaacagaattgcgaactgttcgagcagctcggtgaatacaagtttcagaacgccctgctcgtgcgttataccaaaaaggtccctcaggtgtctacaccaactctggtggaggtcagtaggaatctgggcaaagtgggatcaaagtgttgcaaacaccccgaggcaaagagaatgccttgtgctgaagattacctctccgtcgtgctgaaccagctctgcgtgctgcatgaaaagaccccagtcagcgatcgggtgacaaaatgttgcaccgaatctctggtcaatcgccgaccctgtttcagtgccctcgaagtggacgaaacttatgtgcctaaggagtttcaggctgaaacattcacctttcacgccgatatctgcactctgtccgagaaagaaaggcagattaagaaacagacagcactggtcgagctcgtgaagcataaaccaaaggctaccaaggagcagctgaaagccgtcatggacgatttcgcagcttttgtggaaaagtgttgcaaagccgacgataaggagacttgtttcgcagaagaggggaaaaagctcgtggctgccagccaggcagctctgggtctgcaggttcaattggttgaaagcggtggtggtctggttcagcctggtggtagcctgcgtctgagctgtgcagcaagcggttttacctttagcgattatgtgatgaattgggttcgtcaggcaccgggtaaaggtctggaatgggttgccggtattagctggtcaggtgttaatacccattatgcagatagcgtgaaaggtcgttttaccattagccgtgataatagcaaaaataccctgtatctgcagatgaatagcctgcgtgcagaagataccgcagtttattattgtgcacgtctgggtgcaaccgcaaataatattcgctataaatttatggatgtgtggggtcagggtacactagttaccgttagcagtggtggtggcggcagcggcggtggcggttccggcggtggtggcagcggtggtggtggtagctcttacgaactgacccagcctccgagcgttagcgttgcaccgggtcagaccgcacgtattagctgtagcggtgatagtctgcgtaataaagtttattggtatcagcagaaaccgggtcaggctccggttctggttatttataaaaataatcgtccgagcggtattccggaacgttttagcggtagcaatagcggtaataccgcaaccctgaccattagcggcacccaggcagaagatgaagccgattattattgtcagagctatgatggtcagaaaagcctggtttttggtggtggcaccaagcttaccgttctggcggccgca

SEQ ID NO: 297 - protein, 738 aa, Homo Sapien
QVQLVESGGGLVQPGGSLRLSCAASGFTFSDYVMNWVRQAPGKGLEWVAGISWSGVNTHYADSVKGRFTISRDNSKNTLYLQMNSLRAEDTAVYYCARLGATANNIRYKFMDVWGQGTLVTVSSGGGGSGGGGSGGGGSGGGGSDIELTQPPSVSVAPGQTARISCSGDSLRNKVYWYQQKPGQAPVLVIYKNNRPSGIPERFSGSNSGNTATLTISGTQAEDEADYYCQSYDGQKSLVFGGGTKLTVLDKTHTCPPCPAPEAAGGPSVFLFPPKPKDTLMISRTPEVTCVVVDVSHEDPEVKFNWYVDGVEVHNAKTKPREEQYNSTYRVVSVLTVLHQDWLNGKEYKCKVSNKALPAPIEKTISKAKGQPREPQVYTLPPSREEMTKNQVSLTCLVKGFYPSDIAVEWESNGQPENNYKTTPPVLDSDGSFFLYSKLTVDKSRWQQGNVFSCSVMHEALHNHYTQKSLSLSPGKGGGGSGGGGSGGGGSDIVLTQSPATLSLSPGERATLSCRASQFIGSRYLAWYQQKPGQAPRLLIYGASNRATGVPARFSGSGSGTDFTLTISSLEPEDFATYYCQQYYDYPQTFGQGTKVEIKGGGGSGGGGSGGGGSGGGGSQVQLKESGPALVKPTQTLTLTCTFSGFSLSNRGGGVGWIRQPPGKALEWLAWIDWDDDKSYSTSLKTRLTISKDTSKNQVVLTMTNMDPVDTATYYCARFHLPLVFDSWGQGTLVTVSS

SEQ ID NO: 298 - DNA, 2214 bp, Homo Sapien
caggttcaattggttgaaagcggtggtggtctggttcagcctggtggtagcctgcgtctgagctgtgcagcaagcggttttacctttagcgattatgtgatgaattgggttcgtcaggcaccgggtaaaggtctggaatgggttgccggtattagctggtcaggtgttaatacccattatgcagatagcgtgaaaggtcgttttaccattagccgtgataatagcaaaaataccctgtatctgcagatgaatagcctgcgtgcagaagataccgcagtttattattgtgcacgtctgggtgcaaccgcaaataatattcgctataaatttatggatgtgtggggtcagggtacactagttaccgttagcagtggtggtggcggcagcggcggtggcggttccggcggtggtggcagcggtggtggtggtagcgatatcgaactgacccagcctccgagcgttagcgttgcaccgggtcagaccgcacgtattagctgtagcggtgatagtctgcgtaataaagtttattggtatcagcagaaaccgggtcaggctccggttctggttatttataaaaataatcgtccgagcggtattccggaacgttttagcggtagcaatagcggtaataccgcaaccctgaccattagcggcacccaggcagaagatgaagccgattattattgtcagagctatgatggtcagaaaagcctggtttttggtggtggcaccaagcttaccgttctggacaagacccacacctgccccccctgcccagccccagaggcagcgggcggaccctccgtgttcctgttcccccccaagcccaaggacaccctgatgatcagcaggacccccgaggtgacctgcgtggtggtggacgtgagccacgaggacccagaggtgaagttcaactggtacgtggacggcgtggaggtgcacaacgccaagaccaagcccagagaggagcagtacaacagcacctacagggtggtgtccgtgctgaccgtgctgcaccaggactggctgaacggcaaggaatacaagtgcaaggtctccaacaaggccctgccagcccccatcgaaaagaccatcagcaaggccaagggccagccacgggagccccaggtgtacaccctgcccccctcccgggaggagatgaccaagaaccaggtgtccctgacctgtctggtgaagggcttctaccccagcgacatcgccgtggagtgggagagcaacggccagcccgagaacaactacaagaccacccccccagtgctggacagcgacggcagcttcttcctgtacagcaagctgaccgtggacaagtccaggtggcagcagggcaacgtgttcagctgcagcgtgatgcacgaagcgctgcacaaccactacacccagaagagcctgagcctgtcccccggcaagggaggtggcgggagtggtggagggggctcaggcgggggtggatctgatatcgtgctgacacagagccctgccaccctgtctctgagccctggcgagagagccaccctgagctgccgggccagccagttcatcggctcccgctacctggcctggtatcagcagaagcccggacaggctcccagactgctgatctacggcgccagcaacagagctaccggcgtgcccgccagattttctggcagcggcagcggcaccgacttcaccctgaccatcagcagcctggaacccgaggacttcgccacctactactgccagcagtactacgactacccccagaccttcggccagggcaccaaggtggagatcaagggcggaggcggatccgggggtggcggaagtggaggcggaggaagcggagggggcggaagccaggtgcaattgaaagagtccggccctgccctggtgaagcctacccagaccctgaccctgacatgcaccttcagcggcttcagcctgagcaacagaggcggcggagtgggctggatcagacagcctcccggcaaggccctggaatggctggcctggatcgactgggacgacgacaagagctacagcaccagcctgaaaacccggctgaccatctccaaggacaccagcaagaaccaggtggtgctcaccatgaccaacatggaccccgtggacaccgccacctattattgcgcccggtttcatctgcccctggtgttcgatagctggggccagggaaccctggtgacagtgtccagc

SEQ ID NO: 299 - protein, 738 aa, Homo Sapien
DIVLTQSPATLSLSPGERATLSCRASQFIGSRYLAWYQQKPGQAPRLLIYGASNRATGVPARFSGSGSGTDFTLTISSLEPEDFATYYCQQYYDYPQTFGQGTKVEIKGGGGSGGGGSGGGGSGGGGSQVQLKESGPALVKPTQTLTLTCTFSGFSLSNRGGGVGWIRQPPGKALEWLAWIDWDDDKSYSTSLKTRLTISKDTSKNQVVLTMTNMDPVDTATYYCARFHLPLVFDSWGQGTLVTVSSDKTHTCPPCPAPEAAGGPSVFLFPPKPKDTLMISRTPEVTCVVVDVSHEDPEVKFNWYVDGVEVHNAKTKPREEQYNSTYRVVSVLTVLHQDWLNGKEYKCKVSNKALPAPIEKTISKAKGQPREPQVYTLPPSREEMTKNQVSLTCLVKGFYPSDIAVEWESNGQPENNYKTTPPVLDSDGSFFLYSKLTVDKSRWQQGNVFSCSVMHEALHNHYTQKSLSLSPGKGGGGSGGGGSGGGGSQVQLVESGGGLVQPGGSLRLSCAASGFTFSDYVMNWVRQAPGKGLEWVAGISWSGVNTHYADSVKGRFTISRDNSKNTLYLQMNSLRAEDTAVYYCARLGATANNIRYKFMDVWGQGTLVTVSSGGGGSGGGGSGGGGSGGGGSDIELTQPPSVSVAPGQTARISCSGDSLRNKVYWYQQKPGQAPVLVIYKNNRPSGIPERFSGSNSGNTATLTISGTQAEDEADYYCQSYDGQKSLVFGGGTKLTVL

SEQ ID NO: 300 - DNA, 2214 bp, Homo Sapien
gatatcgtgctgacacagagccctgccaccctgtctctgagccctggcgagagagccaccctgagctgccgggccagccagttcatcggctcccgctacctggcctggtatcagcagaagcccggacaggctcccagactgctgatctacggcgccagcaacagagctaccggcgtgcccgccagattttctggcagcggcagcggcaccgacttcaccctgaccatcagcagcctggaacccgaggacttcgccacctactactgccagcagtactacgactacccccagaccttcggccagggcaccaaggtggagatcaagggcggaggcggaagcgggggtggcggaagtggaggcggaggaagcggagggggcggaagccaggtgcaattgaaagagtccggccctgccctggtgaagcctacccagaccctgaccctgacatgcaccttcagcggcttcagcctgagcaacagaggcggcggagtgggctggatcagacagcctcccggcaaggccctggaatggctggcctggatcgactgggacgacgacaagagctacagcaccagcctgaaaacccggctgaccatctccaaggacaccagcaagaaccaggtggtgctcaccatgaccaacatggaccccgtggacaccgccacctattattgcgcccggtttcatctgcccctggtgttcgatagctggggccagggaaccctggtgacagtgtccagcgacaagacccacacctgccccccctgcccagccccagaggcagcgggcggaccctccgtgttcctgttcccccccaagcccaaggacaccctgatgatcagcaggacccccgaggtgacctgcgtggtggtggacgtgagccacgaggacccagaggtgaagttcaactggtacgtggacggcgtggaggtgcacaacgccaagaccaagcccagagaggagcagtacaacagcacctacagggtggtgtccgtgctgaccgtgctgcaccaggactggctgaacggcaaggaatacaagtgcaaggtctccaacaaggccctgccagcccccatcgaaaagaccatcagcaaggccaagggccagccacgggagccccaggtgtacaccctgcccccctcccgggaggagatgaccaagaaccaggtgtccctgacctgtctggtgaagggcttctaccccagcgacatcgccgtggagtgggagagcaacggccagcccgagaacaactacaagaccacccccccagtgctggacagcgacggcagcttcttcctgtacagcaagctgaccgtggacaagtccaggtggcagcagggcaacgtgttcagctgcagcgtgatgcacgaagcgctgcacaaccactacacccagaagagcctgagcctgtcccccggcaagggaggtggcgggagtggtggagggggctcaggcgggggtggatctcaggttcaattggttgaaagcggtggtggtctggttcagcctggtggtagcctgcgtctgagctgtgcagcaagcggttttacctttagcgattatgtgatgaattgggttcgtcaggcaccgggtaaaggtctggaatgggttgccggtattagctggtcaggtgttaatacccattatgcagatagcgtgaaaggtcgttttaccattagccgtgataatagcaaaaataccctgtatctgcagatgaatagcctgcgtgcagaagataccgcagtttattattgtgcacgtctgggtgcaaccgcaaataatattcgctataaatttatggatgtgtggggtcagggtacactagttaccgttagcagtggtggtggtggtagcggtggtggcggatctggtggcggtggttcaggtggtggtggcagtgatatcgaactgacccagcctccgagcgttagcgttgcaccgggtcagaccgcacgtattagctgtagcggtgatagtctgcgtaataaagtttattggtatcagcagaaaccgggtcaggctccggttctggttatttataaaaataatcgtccgagcggtattccggaacgttttagcggtagcaatagcggtaataccgcaaccctgaccattagcggcacccaggcagaagatgaagccgattattattgtcagagctatgatggtcagaaaagcctggtttttggtggtggcaccaagcttaccgttctg

SEQ ID NO: 301 - DNA, 53 bp, Homo Sapien
gctacgtcgcgattctggaaggcgtgcactgtcaggtgcaattggtggaaagc

SEQ ID NO: 302 - DNA, 30 bp, Homo Sapien
gctacggctagctgagctaaccgtcaccag

SEQ ID NO: 303 - DNA, 33 bp, Homo Sapien
gctacgaccggtgatatcgaactgacccagccg

SEQ ID NO: 304 - DNA, 28 bp, Homo Sapien
gctacgaagcttcgtgccgccgccaaac

SEQ ID NO: 305 - DNA, 33 bp, Homo Sapien
cagtacctgcagaagtccagctacgacgagcac

SEQ ID NO: 306 - DNA, 33 bp, Homo Sapien
gtgctcgtcgtagctggacttctgcaggtactg

SEQ ID NO: 307 - DNA, 23 bp, Homo Sapien
ggcccacaagagcgagatcgccc

SEQ ID NO: 308 - DNA, 78 bp, Homo Sapien
gcggccgcccggcgcgcctcatcagtgatggtgatgatggtgggccagggcgtccttggaccgggtcaccaggttggg

SEQ ID NO: 309 - DNA, 36 bp, Homo Sapien
tgtcaggtgcaattggtcgagtctggcggaggactg

SEQ ID NO: 310 - DNA, 20 bp, Homo Sapien
ccttggtgctggctgagctg

SEQ ID NO: 311 - DNA, 39 bp, Homo Sapien
gcttccggacaccaccggtgacatcgagctgacccagcc

SEQ ID NO: 312 - DNA, 36 bp, Homo Sapien
cagcacggtaagcttggtgcctccgccgaacaccag

SEQ ID NO: 313 - DNA, 53 bp, Homo Sapien; identical to SEQ ID NO: 301

SEQ ID NO: 314 - DNA, 30 bp, Homo Sapien; identical to SEQ ID NO: 302

SEQ ID NO: 315 - DNA, 31 bp, Homo Sapien
ggtccaactgcacggtagctttctagagccg

SEQ ID NO: 316 - DNA, 31 bp, Homo Sapien
cggctctagaaagctaccgtgcagttggacc

SEQ ID NO: 317 - DNA, 27 bp, Homo Sapien
gcggaacaaagcttaccgtgctgggcc

SEQ ID NO: 318 - DNA, 27 bp, Homo Sapien
ggcccagcacggtaagctttgttccgc

SEQ ID NO: 319 - DNA, 33 bp, Homo Sapien; identical to SEQ ID NO: 303

SEQ ID NO: 320 - DNA, 28 bp, Homo Sapien
gctacgaagcttcgtgccgccgccaaac

SEQ ID NO: 321 - DNA, 29 bp, Homo Sapien
ggccagggcacacttgtgaccgtcagctc

SEQ ID NO: 322 - DNA, 29 bp, Homo Sapien
gagctgacggtcacaagtgtgccctggcc

SEQ ID NO: 323 - DNA, 80 bp, Homo Sapien
ggccccaacctggtgacccggtccaaggacgccctggccggcggctccggcggaagcgatatcgtgctgacacagagccc

SEQ ID NO: 324 - DNA, 64 bp, Homo Sapien
gtttaaacgggccctctagagcggccgcccggcgcgcctcagctggacactgtcaccagggttc

SEQ ID NO: 325 - DNA, 32 bp, Homo Sapien
gcggccagtcaggcagcgcttggtttgtgatg

SEQ ID NO: 326 - DNA, 32 bp, Homo Sapien
catcacaaaccaagcgctgcctgactggccgc

SEQ ID NO: 327 - DNA, 43 bp, Homo Sapien
caggcagcgcttggtttgggcggctccggcggaagcgatatcg

SEQ ID NO: 328 - DNA, 24 bp, Homo Sapien
gggtttaaacgggccctctagagc

SEQ ID NO: 329 - DNA, 58 bp, Homo Sapien
caggcagcgcttggtttgggcggctccggcggaagcgatatcgtgctgacccagagcc

SEQ ID NO: 330 - DNA, 59 bp, Homo Sapien
gccctctagagcggccgcccggcgcgcctcatcagcagctcttgggctccactctcttg

SEQ ID NO: 331 - DNA, 39 bp, Homo Sapien
caagacccacaccggcccccccggcccagccccagaggc

SEQ ID NO: 332 - DNA, 39 bp, Homo Sapien
gcctctggggctgggccgggggggccggtgtgggtcttg

SEQ ID NO: 333 - DNA, 35 bp, Homo Sapien
gcgacggcagcttcaccctggacagcaagctgacc

SEQ ID NO: 334 - DNA, 35 bp, Homo Sapien
ggtcagcttgctgtccagggtgaagctgccgtcgc

SEQ ID NO: 335 - DNA, 40 bp, Homo Sapien
ccgttgcgccgactgaggcctgctgataagcatgcgtagg

SEQ ID NO: 336 - DNA, 40 bp, Homo Sapien
cctacgcatgcttatcagcaggcctcagtcggcgcaacgg
